(19) United States
(12) Patent Application Publication
(10) Pub. No.: US 2022/0333208 A1
(43) Pub. Date: Oct. 20, 2022

(54) CRISPR EFFECTOR SYSTEM BASED MULTIPLEX CANCER DIAGNOSTICS

(71) Applicants: THE BROAD INSTITUTE, INC., Cambridge, MA (US); MASSACHUSETTS INSTITUTE OF TECHNOLOGY, Cambridge, MA (US); DANA-FARBER CANCER INSTITUTE, INC., Boston, MA (US)

(72) Inventors: Jonathan Gootenberg, Cambridge, MA (US); Omar Abudayyeh, Cambridge, MA (US); Jeremy Koob, Cambridge, MA (US); Rahul Vedula, Boston, MA (US); Coleman Lindsley, Boston, MA (US); Feng Zhang, Cambridge, MA (US)

(73) Assignees: THE BROAD INSTITUTE, INC., Cambridge, MA (US); MASSACHUSETTS INSTITUTE OF TECHNOLOGY, Cambridge, MA (US); DANA-FARBER CANCER INSTITUTE, INC., Boston, MA (US)

(21) Appl. No.: 17/640,016

(22) PCT Filed: Sep. 3, 2020
(86) PCT No.: PCT/US2020/049257

§ 371 Date: Mar. 3, 2022

Related U.S. Application Data
(60) Provisional application No. 62/895,415, filed on Sep. 3, 2019.

(51) Int. Cl. C12Q 1/6886; C12Q 1/682

(52) U.S. Cl. CPC C12Q 1/6886; C12Q 1/682; C12Q 2600/16

(57) ABSTRACT

Systems and methods for rapid diagnostics related to the use of CRISPR effector systems and optimized guide sequences, including multiplex lateral flow diagnostic devices and methods of use, including for detection of cancer markers, are provided.

### CROSS-REFERENCE TO RELATED APPLICATIONS

[0001] This application claims the benefit of U.S. Provisional Application No. 62/895,415, filed Sep. 3, 2019. The entire contents of the above-identified applications are hereby fully incorporated herein by reference.

### STATEMENT REGARDING FEDERALLY SPONSORED RESEARCH

[0002] This invention was made with government support under Grant No.(s) MH110049, HL141201, HG009761, and CA210382, awarded by the National Institutes of Health. The government has certain rights in the invention.

### REFERENCE TO AN ELECTRONIC SEQUENCE LISTING

[0003] The contents of the electronic sequence listing (“BROD-4630WP_ST25.txt”; Size is 659,305 bytes (659 KB on disk) and it was created on Sep. 3, 2020) is herein incorporated by reference in its entirety.

### TECHNICAL FIELD

[0004] The subject matter disclosed herein is generally directed to rapid diagnostics related to the use of CRISPR detection systems, in particular cancer diagnostics.

### BACKGROUND

[0005] Nucleic acids are a universal signature of biological information. The ability to rapidly detect nucleic acids with high sensitivity and single-base specificity on a portable platform has the potential to revolutionize diagnosis and monitoring for many diseases, provide valuable epidemiological information, and serve as a generalizable scientific tool. Although many methods have been developed for detecting nucleic acids (Du et al., 2017; Green et al., 2014; Kumar et al., 2014; Pardee et al., 2014; Pardee et al., 2016; Urdea et al., 2006), they inevitably suffer from trade-offs among sensitivity, specificity, simplicity, and speed. For example, qPCR approaches are sensitive but are expensive and rely on complex instrumentation, limiting usability to highly trained operators in laboratory settings. Other approaches, such as new methods combining isothermal nucleic acid amplification with portable platforms (Du et al., 2017; Pardee et al., 2016), offer high detection specificity in a point-of-care (POC) setting, but have somewhat limited applications due to low sensitivity. As nucleic acid diagnostics become increasingly relevant for a variety of healthcare applications, detection technologies that provide high specificity and sensitivity at low cost would be of great utility in both clinical and basic research settings.

[0006] Sensitive and rapid detection of nucleic acids is important for clinical diagnostics and biotechnological applications. The development of data-driven models for aiding experimental design has featured prominently during the maturation of molecular tools. Software for choosing optimal primer or probe sequences is vital for amplification and molecular detection technologies as well as CRISPR-based methods. Genome-informed thermodynamic models for primer selection (Ye, 2012), computational probe design for nucleic acid detection (Kim, 2015), and machine learning models for CRISPR off-target (Hsu, 2013) and on-target (Doench, 2014) prediction have all broadened use of corresponding technologies. An accurate model for activity-based Cas13 guide selection would facilitate design of optimal SHERLOCK assays, especially in applications requiring high-activity guides like lateral flow detection, and enable guide RNA design for in vivo RNA targeting applications with Cas13. Particularly useful applications include rapid identification of diseases such as cancer where identification is critical for proper treatment and prognosis.

### SUMMARY

[0007] In certain example embodiments, a nucleic acid detection system is provided for detecting the presence of one or more cancers in a sample comprising one or more CRISPR system comprising one or more Cas polypeptides and one or more optimized guide molecules designed to bind to one or more corresponding target molecules of one or more cancer fusion genes; and one or more detection constructs.

[0008] In embodiments, the detection construct is an RNA-based detection construct, which can be a masking construct that suppresses generation of a detectable signal. In one aspect, the masking construct suppresses generation of a detectable positive signal by masking the detectable positive signal, or generating a detectable negative signal instead. The RNA-based masking construct can comprise a silencing RNA that suppresses generation of a gene product encoded by a reporting construct, wherein the gene product generates the detectable positive signal when expressed. In embodiments, the RNA-based masking construct is a ribozyme that generates the negative detectable signal, and wherein the positive detectable signal is generated when the ribozyme is deactivated. In an aspect, the ribozyme converts a substrate to a first color and wherein the substrate converts to a second color when the ribozyme is deactivated.

[0009] The RNA-based masking construct, in embodiments, is an RNA aptamer and/or comprises an RNA-tethered inhibitor. In an aspect, the aptamer or RNA-tethered inhibitor sequesters an enzyme, wherein the enzyme generates a detectable signal upon release from the aptamer or RNA tethered inhibitor by acting upon a substrate. The aptamer can be an inhibitory aptamer that inhibits an enzyme and prevents the enzyme from catalyzing generation of a detectable signal from a substrate or wherein the RNA-tethered inhibitor inhibits an enzyme and prevents the enzyme from catalyzing generation of a detectable signal from a substrate. In embodiments, the enzyme is thrombin, protein C, neutrophil elastase, subtilisin, horseradish peroxidase, beta-galactosidase, or calf alkaline phosphatase. The enzyme can be thrombin, in embodiments, and the substrate is para-nitroanilide covalently linked to a peptide substrate for thrombin, or 7-amino-4-methylcoumarin covalently linked to a peptide substrate for thrombin. In some embodiments, the aptamer sequesters a pair of agents that when released from the aptamers combine to generate a detectable signal.

[0010] In an aspect, the RNA-based masking construct comprises an RNA oligonucleotide to which a detectable ligand and a masking component are attached. The RNA-based masking construct can comprise a nanoparticle held in aggregate by bridge molecules, wherein at least a portion of the bridge molecules comprises RNA, and wherein the solution undergoes a color shift when the nanoparticle is disbursed in solution. In an aspect, the nanoparticle is a colloidal metal, optionally colloidal gold. In embodiments, the detection construct is a gold nanoparticle, optionally modified with a binding agent that specifically binds the second molecule of the detection construct.

[0011] Systems and methods disclosed herein may use an RNA-based masking construct comprising a quantum dot linked to one or more quencher molecules by a linking molecule, wherein at least a portion of the linking molecule comprises RNA. The RNA-based masking construct can comprise RNA in complex with an intercalating agent, wherein the intercalating agent changes absorbance upon cleavage of the RNA. In an aspect, the intercalating agent is pyronine-Y or methylene blue. Detectable ligands used herein can comprise a fluorophore with a masking component that is a quencher molecule. In embodiments, the RNA-based detection construct is a nucleic-acid based aptamer comprising quadruplex having enzymatic activity, which can be peroxidase activity in some embodiments.

[0012] The detection construct can comprise a first molecule on a first end and a second molecule on a second end. In embodiments, FAM is the first molecule and biotin or Digoxigenin (DIG) is the second molecule. In embodiments, Tye665 is the first molecule and Alexa-488 or FAM is the second molecule.

[0013] In certain embodiments, the systems and methods detect one or more cancers selected from acute promyelocytic leukemia (APML), chronic myeloid leukemia (CIVIL), and/or acute lymphoblastic leukemia (ALL). In an aspect, the PML-RARa fusion is the PML-RARa intron/exon 6 fusion, or the PML-RARa fusion is the PML-RARa intron 3 fusion. In certain embodiments, the Cas protein is LwaCas13a and the guide molecule comprises SEQ ID NO: 2761, 2764, 2767, 2770, 2773, 2776, 2779, 2782, 2785, 2788, 2791, 2794, 2797, 2800, 2803, 2806, 2809, 2812, 2815, 2818, 2821, 2824, 2827, 2830, 2833, 2836, 2839, 2842, 2845, 2848, 2851, 2854, 2857, 2860, 2863, 2866, 2869, 2872, 2875, 2878, 2881, 2884, or 2887. In certain embodiments, the Cas protein is LwaCas13a and the guide molecule comprises SEQ ID NO: 2760, 2763, 2766, 2769, 2772, 2775, 2778, 2781, 2784, 2787, 2790, 2793, 2796, 2799, 2802, 2805, 2808, 2811, 2814, 2817, 2820, 2823, 2826, 2829, 2832, 2835, 2838, 2841, 2844, 2847, 2850, 2853, 2856, 2859, 2862, 2865, 2868, 2871, 2874, 2877, 2880, 2883, 2886, 3189, or 3195. In certain embodiments, the Cas protein is CcaCas13b and the guide molecule comprises SEQ ID NO: 2890, 2893, 2896, 2899, 2902, 2905, 2908, 2911, 2914, 2917, 2920, 2923, 2926, 2929, 2932, 2935, 2938, 2941, 2944, 2947, 2950, 2953, 2956, 2959, 2962, 2965, 2968, 2971, 2974, 2977, 2980, 2983, 2986, 2989, 2992, 2995, 2998, or 3001. In certain embodiments, the Cas protein is CcaCas13b and the guide molecule comprises SEQ ID NO: 2889, 2892, 2895, 2898, 2901, 2904, 2907, 2910, 2913, 2916, 2919, 2922, 2925, 2928, 2931, 2934, 2937, 2940, 2943, 2946, 2949, 2952, 2955, 2958, 2961, 2964, 2967, 2970, 2973, 2976, 2979, 2982, 2985, 2988, 2991, 2994, 2997, 3171, 3207, 3177 or 3213.

[0014] In embodiments, the BCR-ABL fusion is the BCR-ABL p210 b3a2 fusion, b2a2 fusion, or a p190 ela2 fusion. In an aspect, the top guide, or optimized guide, is generated for a Cas13 ortholog, in an aspect, the optimized guide is generated for an LwaCas13a or a CcaCas13b ortholog In an aspect, the Cas protein is LwaCas13a and the guide molecule comprises a top predicted guide from SEQ ID NOs: 3153, 3159, 3189 or 3195. In certain embodiments, the Cas protein is CcaCas13b and the guide molecule comprises a top predicted guide selected from SEQ ID NO: 3171, 3177, 3207, or 3213.

[0015] The one or more Cas polypeptides in systems and methods disclosed herein include one or more Type V Cas proteins, one or more Type VI proteins, or a combination of Type V and Type VI proteins. In an aspect, the Type VI Cas protein is a Cas13. In an aspect, the Type V Cas polypeptide is a Cas12 polypeptide.

[0016] The optimized guide for the target molecule can, in one aspect, be generated by pooling a set of guides, the guides produced by tiling guides across the target molecule; incubating the set of guides with a Cas polypeptide and the target molecule and measuring cleavage activity of each guide in the set; creating a training model based on the cleavage activity of the set of guides in the incubating step; predicting highly active guides for the target molecule; and identifying the optimized guides by incubating the predicted highly active In an aspect, the training model comprises one or more input features selected from guide sequence, flanking target sequence, normalized positions of the guide in the target and guide GC content. In embodiments, the guide sequence and/or flanking sequence input comprises one hit encoding mono-nucleotide and/or dinucleotide based identities across a guide length and flanking sequence in the target. In an aspect, the training model comprises applying logistic regression model on the activity of the guides across the one or more input features. The step of predicting highly active guides for the target molecule can comprise selecting guides with an increase in activity of a guide relative to the median activity, or selecting guides with highest guide activity. In embodiments, the increase in activity is measured by an increase in fluorescence. In an aspect, the guides are selected with a 1.5, 2, 2.5 or 3-fold activity relative to median, or are in the top quartile or quintile for each target tested. Optimized guides can be generated for a Cas13 ortholog with the methods disclosed herein and for use in the systems presently disclosed. In an aspect, the optimized guide is generated for an LwaCas13a or a Cca13b ortholog.

[0017] One or more amplification reagents to amplify the one or more target molecules can be provided in certain embodiments. In an aspect, the reagents to amplify the one or more target RNA molecules comprise nucleic acid sequence-based amplification (NASBA), recombinase polymerase amplification (RPA), loop-mediated isothermal amplification (LAMP), strand displacement amplification (SDA), helicase-dependent amplification (HDA), nicking enzyme amplification reaction (NEAR), PCR, multiple displacement amplification (MDA), rolling circle amplification (RCA), ligase chain reaction (LCR), or ramification amplification method (RAM).

[0018] Lateral flow devices are provided comprising a substrate comprising a first end, wherein the first end comprises a sample loading portion and a first region loaded with a detection construct and one or more nucleic acid detection systems of any one of the preceding claims, a first capture region comprising a first binding agent, and a second capture region comprising a second binding agent. In embodiments, the later flow device sample loading portion further comprises one or more amplification reagents to amplify the one or more target molecules.

[0019] Methods for detecting a cancer fusion gene in a sample, comprising contacting the sample with the nucleic acid detection system as disclosed herein. Methods can comprise amplifying the target molecules in the sample by RT-RPA, optionally with AMV RT.

[0020] In one aspect, contacting the sample with the nucleic acid detection system comprises contacting the sample with a lateral flow device. The sample can, in some embodiments, be blood, bone marrow, or pelleted cells. In certain instances, where the sample comprises cells, the method comprises the step of lysing the pelleted cells. In an aspect, the method can comprise extracting RNA from a crude sample for detection.

[0021] The methods disclosed herein can further comprise steps of extracting RNA, performing RT-RPA, performing T7 transcription, and detecting the target nucleic acids. In one aspect, detecting the target nucleic acids comprises activating the Cas protein via binding of the one or more guide molecules to the one or more cancer-specific target molecules, wherein activating the Cas protein results in modification of the RNA-based masking construct such that a detectable positive signal is produced; and detecting the signal, wherein detection of the signal indicates the presence of a cancer-specific fusion gene. The detecting step can be s less than about 45 minutes to less than about 3 hours.

[0022] The present disclosure provides systems and methods wherein a plurality of cancer fusion genes can be detecting simultaneously on a multiplex lateral flow strip. In certain embodiments, detecting PML-RARa Intron/exon 6 fusion and Intron 3 fusion is performed simultaneously on multiplex lateral flow, which can optionally comprise a FAM and/or Alexa 488 molecules. In an aspect, the methods and systems can detect to a sensitivity of about 2 fM, or about 200 aM.

[0023] These and other aspects, objects, features, and advantages of the example embodiments will become apparent to those having ordinary skill in the art upon consideration of the following detailed description of illustrated example embodiments.

### BRIEF DESCRIPTION OF THE DRAWINGS

[0024] An understanding of the features and advantages of the present invention will be obtained by reference to the following detailed description that sets forth illustrative embodiments, in which the principles of the invention may be utilized, and the accompanying drawings of which:

[0025] FIG. 1—SHERLOCK guide design machine learning model is capable of predicting highly active crRNAs for SHERLOCK detection. FIG. 1A Schematic of computational workflow of the SHERLOCK guide design tool; FIG. 1B Collateral activity of LwaCas13a and Capnocytophaga canimorsus Cc5 (CcaCas13b) with crRNAs tiling Ebola and Zika synthetic ssRNA targets; FIG. 1C ROC and AUC results of the best performing logistic regression model for LwaCas13 a (light gray) and CcaCas13b (dark gray) trained using crRNAs tiled and five different synthetic RNA targets; FIG. 1D Selected mono-nucleotide feature weights of the best performing logistic regression model for LwaCas13a (left) and CcaCas13b (right). Known PFS constraints are shown as letters above the appropriate flanking positions.

[0026] FIG. 2A-2E—SHERLOCK guide design machine learning model validates across many crRNAs, can predict crRNAs with high activity on lateral flow strips, and correlates with in vivo knockdown. FIG. 2A Validation of best performing model for LwaCas13a across multiple crRNAs, showing the predicted score of each crRNA versus actual collateral activity upon target recognition of thermonuclease, APML long, or APML short synthetic targets. The best and worst crRNAs predicted by the model are highlighted in blue and red, respectively. FIG. 2B Kinetic data of predicted best and worst performing LwaCas13 a crRNAs highlighted in panel 2a on thermonuclease, APML long, and APML short synthetic RNA targets. FIG. 2C Lateral flow performance of the predicted best and worst LwaCas13a crRNAs from panel 2a on detecting thermonuclease, APML long, and APML short synthetic RNA targets. FIG. 2D Schematic for evaluating the predictive performance of the guide design model for in vivo knockdown activity. FIG. 2E Previously measured knockdown activity of LwaCas13 a guides tiled across Gluc and KRAS targets¹⁴ was ranked according to the predicted activity of the guide based on the guide design model. The means of the distributions are shown as red dotted lines while the quartiles are shown as blue dotted lines. ***p<0.001; *p<0.05; two-tailed student's T-test.

[0027] FIG. 3A-3L—One-pot RPA-SHERLOCK is capable of rapid and portable detection of different targets. FIG. 3A Schematic of one-pot LwaCas13a SHERLOCK detection of acyltransferase target from P. aeruginosa with the best and worst predicted crRNAs from the guide design model; FIG. 3B Kinetic curves of one-pot LwaCas13a SHERLOCK detection of acyltransferase target from P. aeruginosa with the best predicted crRNA; FIG. 3C Kinetic curves of one-pot LwaCas13a SHERLOCK detection of acyltransferase target from P. aeruginosa with the worst predicted crRNA; FIG. 3D One-pot LwaCas13a SHERLOCK end-point detection of acyltransferase target from P. aeruginosa for the best and worst crRNAs at 1 hour; FIG. 3E One-pot LwaCas13a SHERLOCK lateral flow detection of acyltransferase target from P. aeruginosa using the best and worst predicted crRNAs at 1 hour; FIG. 3F Quantitation of one-pot LwaCas13a SHERLOCK end-point lateral flow detection of acyltransferase target from P. aeruginosa using the best and worst predicted crRNAs at 1 hour; FIG. 3G Schematic CcaCas13b one-pot SHERLOCK detection of thermonuclease target from S. aureus with the best and worst predicted crRNAs from the guide design model; FIG. 3H Kinetic curves of one-pot CcaCas13b SHERLOCK detection of thermonuclease target from S. aureus with the best predicted crRNA; FIG. 3I Kinetic curves of one-pot CcaCas13b SHERLOCK detection of thermonuclease target from S. aureus with the worst predicted crRNA; FIG. 3J One-pot CcaCas13b SHERLOCK end-point detection of thermonuclease target from S. aureus for the best and worst crRNAs at 1 hour; FIG. 3K One-pot CcaCas13b SHERLOCK lateral flow detection of thermonuclease target from S. aureus using the best and worst predicted crRNAs at 1 hour; FIG. 3L Quantitation of one-pot CcaCas13b SHERLOCK end-point lateral flow detection of thermonuclease target from S. aureus using the best and worst predicted crRNAs at 1 hour.

[0028] FIG. 4A-4E Multiplexed lateral flow detection with SHERLOCK. FIG. 4A Schematic of multiplex detection with one-pot SHERLOCK, with either fluorescent readout or lateral flow format. FIG. 4B Multiplexed fluorescence detection with one-pot SHERLOCK detection of Ea175 and thermonuclease targets using LwaCas13a and CcaCas13b orthologs, respectively, and the best predicted cRNAs; FIG. 4C Schematic of multiplex lateral flow with SHERLOCK; FIG. 4D Representative images of multiplexed lateral flow detection with one-pot SHERLOCK of Ea175 and thermonuclease targets using LwaCas13a and CcaCas13b orthologs, with quantitation of lateral flow strip band intensities. Lateral flow strip band intensities are inverted such that loss of signal is shown as positive signal; FIG. 4E Multiplexed lateral flow detection with one-pot SHERLOCK detection of Ea175 and thermonuclease targets using LwaCas13a and CcaCas13b orthologs, respectively, and the best predicted cRNAs. Lateral flow strip band intensities are inverted such that loss of signal is shown as positive signal.

[0029] FIG. 5A-5F Detection of PML-RARa and BCR-ABL cancer fusion transcripts from clinical samples. FIG. 5A Diagram of guide design for PML-RARa and BCR-ABL fusion transcripts tested in this study using the guide design model. Diagram of fusion transcripts adapted from van Dongen et al²⁸. FIG. 5B Workflow for SHERLOCK testing of clinical samples of patients exhibiting PML-RARa and BCR-ABL fusion transcripts. Patient blood or bone marrow is extracted, pelleted, and RNA is purified from patient cells. Extracted RNA is then used as input into an RT-RPA reaction, the products of which are used as input for Cas13 detection; FIG. 5C RT-PCR of APML and BCR-ABL cancer variants from purified RNA. Composite image is made up of bands cut out from several gels running PCR products for the different transcripts (full gel images shown in FIG. 14A-14E). PCR products for the different fusions should have the following sizes: PML-RARa Intron 6 (214 bp); PML-RARa Intron 3: 289 bp; BCR-ABL p210 e14a2 (360 bp); BCR-ABL p210 e13a2 (285 bp); BCR-ABL p190 e1a2 (381 bp); FIG. 5D Two-step SHERLOCK end-point fluorescence detection of PML-RARa and BCR-ABL fusion transcripts using best predicted crRNAs at 45 minutes. RNA from each patient was amplified using primer sets for the three fusion transcripts shown, and Cas13 detection was setup with corresponding crRNAs. Greyed out bars (sample 15) indicate that data was not collected; FIG. 5E Two-step SHERLOCK lateral flow detection of PML-RARa and BCR-ABL fusion transcripts using best predicted crRNAs at 3 hours. Sample bands were cropped out from the lateral flow strips; full lateral flow images, containing both sample and control bands, are shown in FIG. 15. Greyed out boxes (sample 15) indicate that data was not collected; FIG. 5F Quantitation of the lateral flow data shown in (e). Greyed out bars (sample 15) indicate that data was not collected.

[0030] FIG. 6A-6C Multiplexed detection of PML-RARa and BCR-ABL cancer fusion transcripts from clinical samples FIG. 6A Schematic of two-step SHERLOCK multiplexed detection from RNA input; FIG. 6B Images of multiplexed lateral flow detection with two-step SHERLOCK detection of PML-RARa Intron/Exon 6 and Intron 3 fusion transcripts using LwaCas13a and CcaCas13b orthologs, respectively, and the best predicted cRNAs; FIG. 6C Quantitation of lateral flow strip band intensities; data are inverted such that loss of signal is shown as positive signal.

[0031] FIG. 7A-7C Training data and features of the SHERLOCK guide design model. FIG. 7A Collateral activity of LwaCas13a (blue) and CcaCas13b (red) with crRNAs tiling Ebola and Zika synthetic ssRNA targets; FIG. 7B Mono-nucleotide feature weights of the best performing logistic regression model for LwaCas13a (top) and CcaCas13b (bottom); FIG. 7C. Di-nucleotide feature weights of the best performing logistic regression model for LwaCas13a (left) and CcaCas13b (right).

[0032] FIG. 8A-8C: SHERLOCK guide design machine learning model validates across many crRNAs (CcaCas13b). FIG. 8A. Validation of best performing model for CcaCas13b across multiple crRNAs, showing the predicted score of each crRNA versus actual collateral activity upon target recognition of thermonuclease, APML long, or APML short synthetic targets. The best and worst crRNAs predicted by the model are highlighted in light gray or dark gray, respectively. FIG. 8B. Kinetic data of predicted best and worst performing CcaCas13b crRNAs highlighted in panel 8a on thermonuclease, APML long, and APML short synthetic RNA targets. FIG. 8C. Lateral flow performance of the predicted best and worst CcaCas13b crRNAs from panel 8a on detecting thermonuclease, APML long, and APML short synthetic RNA targets.

[0033] FIG. 9 LwaCas13a guide design model predicts highly active guides for in vivo knockdown. A panel of guides predicted to be highly active or not active, as well as random guides, are tested for knockdown of the Gluc transcript in HEK293FT cells. Each data point represents the mean of three biological replicates. The means of the distributions are shown as red dotted lines while the quartiles are shown as dotted lines.

[0034] FIG. 10A-10F Additional targets are easily detected via one-pot SHERLOCK with lateral flow. FIG. 10A Kinetic curves of one-pot LwaCas13a SHERLOCK detection of Ea175 target. FIG. 10B One-pot LwaCas13a SHERLOCK end-point detection of Ea175 target at 45 minutes. FIG. 10C Quantitation of one-pot LwaCas13a SHERLOCK end-point lateral flow detection of Ea175 target at 30 minutes. FIG. 10D Kinetic curves of one-pot LwaCas13a SHERLOCK detection of Ea81 target. FIG. 10E One-pot LwaCas13a SHERLOCK end-point detection of Ea81 target at 45 minutes. FIG. 1OF Quantitation of one-pot LwaCas13a SHERLOCK end-point lateral flow detection of Ea81 target at 3 hours.

[0035] FIG. 11A-11F One-pot HDA-SHERLOCK is capable of quantitative detection of different targets. FIG. 11A Schematic of helicase reporter for screening DNA unwinding activity; FIG. 11B Temperature sensitivity screen of different helicase orthologs with and without super-helicase mutations using the high-throughput fluorescent reporter; FIG. 11C Schematic of one-pot SHERLOCK with RPA or Super-HAD; FIG. 11D Kinetic curves of one-pot RPA detection of a restriction endonuclease gene fragment (Ea175) from T denticola; FIG. 11E Kinetic curves of one-pot HDA detection of Ea175; FIG. 11F Quantitative nature of HDA-SHERLOCK compared to one-pot RPA.

[0036] FIG. 12A-12F Multiplexed lateral flow detection with two-pot SHERLOCK. FIG. 12A Schematic of multiplex lateral flow with RPA preamplification design for two probes; FIG. 12B Multiplexed lateral flow detection with RPA preamplification of two targets, ssDNA 1 and a gene fragment of lectin from soybeans; FIG. 12C Multiplexed lateral flow detection with RPA preamplification of two targets, ssDNA 1 and lectin gene fragment, at a range of concentrations down to 2 aM; FIG. 12D Schematic for custom-made lateral flow strips enabling detection of three targets simultaneously with SHERLOCK; FIG. 12E Images of multiplexed lateral flow strips detecting three targets, ssDNA 1, Zika ssRNA, and Dengue ssRNA, in various combinations using LwaCas13a, CcaCas13b, and AsCas12a; FIG. 12F Quantitation of Tye-665 fluorescent intensity of multiplexed lateral flow strips detecting three targets, ssDNA 1, Zika ssRNA, and Dengue ssRNA, in various combinations using LwaCas13 a, CcaCas13b, and AsCas12a.

[0037] FIG. 13A-13D SHERLOCK guide design machine learning model validates for crRNAs targeting BCR-ABL p210 b3a2. FIG. 13A Validation of best performing model for CcaCas13b across crRNAs tiling the BCR-ABL p210 b3a2 fusion transcript, showing the predicted score of each crRNA versus actual collateral activity upon target recognition. The best and worst crRNAs predicted by the model are highlighted in light gray or dark gray, respectively. FIG. 13B Validation of best performing model for LwaCas13a across crRNAs tiling the BCR-ABL p210 b3a2 fusion transcript, showing the predicted score of each crRNA versus actual collateral activity upon target recognition. The best and worst crRNAs predicted by the model are highlighted in blue or red, respectively. FIG. 13C Kinetic data of predicted best and worst performing LwaCas13a crRNAs highlighted in 13A on the BCR-ABL p210 b3a2 fusion transcript. FIG. 13D Kinetic data of predicted best and worst performing CcaCas13b crRNAs highlighted in 13B on the BCR-ABL p210 b3a2 fusion transcript.

[0038] FIG. 14A-14E Nested RT-PCR detection of PML-RARa and BCR-ABL cancer fusion transcripts from clinical samples. FIG. 14A Whole gel images of detection of PML-RARa Intron 6: 214 bp. For sample 6, because the breakpoint is in exon 6 of PML, the band size can be variable. FIG. 14B Whole gel images of detection of PML-RARa Intron 3: 289 bp. Some patients that have intron/exon 6 breakpoints, as in samples 4-6, can demonstrate several larger size bands (as seen), due to alternative splicing of PML. FIG. 14C Whole gel images of detection of BCR-ABL p210: e14a2 360 bp, e13a2 285 bp. FIG. 14D Whole gel images of detection of BCR-ABL p190: e1a2 381 bp. FIG. 14E Whole gel images of detection of GAPDH: 138 bp.

[0039] FIG. 15 Detection of PML-RARa and BCR-ABL cancer fusion transcripts from clinical samples. Two-step SHERLOCK lateral flow detection of PML-RARa and BCR-ABL fusion transcripts using best predicted crRNAs at 3 hours. Lateral flow strips are depicted with both the sample and control bands. Greyed out strips (sample 15) indicate that data was not collected.

[0040] The figures herein are for illustrative purposes only and are not necessarily drawn to scale.

### DETAILED DESCRIPTION OF THE EXAMPLE EMBODIMENTS

### General Definitions

[0041] Unless defined otherwise, technical and scientific terms used herein have the same meaning as commonly understood by one of ordinary skill in the art to which this disclosure pertains. Definitions of common terms and techniques in molecular biology may be found in Molecular Cloning: A Laboratory Manual, 2^{nd} edition (1989) (Sambrook, Fritsch, and Maniatis); Molecular Cloning: A Laboratory Manual, 4^{th} edition (2012) (Green and Sambrook); Current Protocols in Molecular Biology (1987) (F. M. Ausubel et al. eds.); the series Methods in Enzymology (Academic Press, Inc.): PCR 2: A Practical Approach (1995) (M. J. MacPherson, B. D. Hames, and G. R. Taylor eds.): Antibodies, A Laboratory Manual (1988) (Harlow and Lane, eds.): Antibodies A Laboratory Manual, 2^{nd} edition 2013 (E. A. Greenfield ed.); Animal Cell Culture (1987) (R. I. Freshney, ed.); Benjamin Lewin, Genes IX, published by Jones and Bartlet, 2008 (ISBN 0763752223); Kendrew et al. (eds.), The Encyclopedia of Molecular Biology, published by Blackwell Science Ltd., 1994 (ISBN 0632021829); Robert A. Meyers (ed.), Molecular Biology and Biotechnology: a Comprehensive Desk Reference, published by VCH Publishers, Inc., 1995 (ISBN 9780471185710); Singleton et al., Dictionary of Microbiology and Molecular Biology 2nd ed., J. Wiley & Sons (New York, N.Y. 1994), March, Advanced Organic Chemistry Reactions, Mechanisms and Structure 4th ed., John Wiley & Sons (New York, N.Y. 1992); and Marten H. Hofker and Jan van Deursen, Transgenic Mouse Methods and Protocols, 2nd edition (2011)

[0042] As used herein, the singular forms “a”, “an”, and “the” include both singular and plural referents unless the context clearly dictates otherwise.

[0043] The term “optional” or “optionally” means that the subsequent described event, circumstance or substituent may or may not occur, and that the description includes instances where the event or circumstance occurs and instances where it does not.

[0044] The recitation of numerical ranges by endpoints includes all numbers and fractions subsumed within the respective ranges, as well as the recited endpoints.

[0045] The terms “about” or “approximately” as used herein when referring to a measurable value such as a parameter, an amount, a temporal duration, and the like, are meant to encompass variations of and from the specified value, such as variations of +/−10% or less, +/−5% or less, +/−1% or less, and +/−0.1% or less of and from the specified value, insofar such variations are appropriate to perform in the disclosed invention. It is to be understood that the value to which the modifier “about” or “approximately” refers is itself also specifically, and preferably, disclosed.

[0046] As used herein, a “biological sample” may contain whole cells and/or live cells and/or cell debris. The biological sample may contain (or be derived from) a “bodily fluid”. The present invention encompasses embodiments wherein the bodily fluid is selected from amniotic fluid, aqueous humour, vitreous humour, bile, blood serum, breast milk, cerebrospinal fluid, cerumen (earwax), chyle, chyme, endolymph, perilymph, exudates, feces, female ejaculate, gastric acid, gastric juice, lymph, mucus (including nasal drainage and phlegm), pericardial fluid, peritoneal fluid, pleural fluid, pus, rheum, saliva, sebum (skin oil), semen, sputum, synovial fluid, sweat, tears, urine, vaginal secretion, vomit and mixtures of one or more thereof. Biological samples include cell cultures, bodily fluids, cell cultures from bodily fluids. Bodily fluids may be obtained from a mammal organism, for example by puncture, or other collecting or sampling procedures.

[0047] The terms “subject,” “individual,” and “patient” are used interchangeably herein to refer to a vertebrate, preferably a mammal, more preferably a human. Mammals include, but are not limited to, murines, simians, humans, farm animals, sport animals, and pets. Tissues, cells and their progeny of a biological entity obtained in vivo or cultured in vitro are also encompassed.

[0048] Various embodiments are described hereinafter. It should be noted that the specific embodiments are not intended as an exhaustive description or as a limitation to the broader aspects discussed herein. One aspect described in conjunction with a particular embodiment is not necessarily limited to that embodiment and can be practiced with any other embodiment(s). Reference throughout this specification to “one embodiment”, “an embodiment,” “an example embodiment,” means that a particular feature, structure or characteristic described in connection with the embodiment is included in at least one embodiment of the present invention. Thus, appearances of the phrases “in one embodiment,” “in an embodiment,” or “an example embodiment” in various places throughout this specification are not necessarily all referring to the same embodiment, but may. Furthermore, the particular features, structures or characteristics may be combined in any suitable manner, as would be apparent to a person skilled in the art from this disclosure, in one or more embodiments. Furthermore, while some embodiments described herein include some but not other features included in other embodiments, combinations of features of different embodiments are meant to be within the scope of the invention. For example, in the appended claims, any of the claimed embodiments can be used in any combination.

[0049] Reference is made to U.S. Provisional Application 62/181,663, U.S. Provisional Application 62/245,264, International Patent Publication WO2016/205749, International Patent Publication WO2016/205764, International Patent Publication WO2017/219027, International Patent Publication WO2018/107129, US Patent Publication 20180298445, US Patent Publication 20180274017, International Patent Publication WO2018/180340, International Patent Publication WO2018/191750, International Patent Publication WO2019/051318, International Patent Application PCT/US2018/054472, International Patent Application PCT/US2018/066940, International Patent Application PCT/US2019/015726, International Patent Application PCT/US2019/039221, International Patent Application PCT/US2019/039195, and International Patent Application PCT/US2019/09167.

[0050] All publications, published patent documents, and patent applications cited herein are hereby incorporated by reference to the same extent as though each individual publication, published patent document, or patent application was specifically and individually indicated as being incorporated by reference.

### Overview

[0051] Embodiments disclosed herein provide systems of detection utilizing optimized guides, and methods of using the detection systems. The detection systems comprise CRISPR systems for target molecule detection. The optimized guides provide sensitive detection and/or rapid kinetics allowing visualization of a signal that can be used in portable detection and use in clinical applications.

[0052] Optimized guides are provided using a guide prediction model to design optimal guides for sensitive detection of chromosomal fusion rearrangements characteristic of acute promyelocytic leukemia (APML) and acute lymphoblastic leukemia (ALL) in a multiplexed lateral flow readout. The combination of predictive guide design tools with a one-pot SHERLOCK format and multiplexed lateral flow detection allows for rapid deployment of robust and portable SHERLOCK assays in the laboratory, clinic, and field.

[0053] Sensitive and rapid detection of nucleic acids is important for clinical diagnostics and biotechnological applications. A platform previously developed by Applicants for nucleic acid detection using CRISPR enzymes, called SHERLOCK (Specific High Sensitivity Enzymatic Reporter unLOCKing)^{1,2}, combines pre-amplification with the RNA-guided RNase Cas13³⁻⁷ and DNase Cas12^{8,9} for sensing of nucleic acids. Here, the platform was extended by applying machine learning to predict strongly active guides for rapid detection of bacterial nucleic acid targets in an optimized one-pot reaction with lateral flow readout, with the developed guide prediction model used to design optimal guides for sensitive detection of chromosomal fusion rearrangements characteristic of acute promyelocytic leukemia (APML) and acute lymphoblastic leukemia (ALL) in a multiplexed lateral flow readout. The combination of predictive guide design tools with a one-pot SHERLOCK format and multiplexed lateral flow detection allows for rapid deployment of robust and portable SHERLOCK assays in the laboratory, clinic, and field.

### Nucleic Acid Detection Systems

### CRISPR Systems

[0054] In general, a CRISPR-Cas or CRISPR system as used herein and in documents, such as International Patent Publication No. WO 2014/093622 (PCT/US2013/074667), refers collectively to transcripts and other elements involved in the expression of or directing the activity of CRISPR-associated (“Cas”) genes, including sequences encoding a Cas gene, a tracr (trans-activating CRISPR) sequence (e.g. tracrRNA or an active partial tracrRNA), a tracr-mate sequence (encompassing a “direct repeat” and a tracrRNA-processed partial direct repeat in the context of an endogenous CRISPR system), a guide sequence (also referred to as a “spacer” in the context of an endogenous CRISPR system), or “RNA(s)” as that term is herein used (e.g., RNA(s) to guide Cas, such as Cas9, e.g. CRISPR RNA and transactivating (tracr) RNA or a single guide RNA (sgRNA) (chimeric RNA)) or other sequences and transcripts from a CRISPR locus. In general, a CRISPR system is characterized by elements that promote the formation of a CRISPR complex at the site of a target sequence (also referred to as a protospacer in the context of an endogenous CRISPR system). When the CRISPR protein is a C2c2 protein, a tracrRNA is not required. C2c2 has been described in Abudayyeh et al. (2016) “C2c2 is a single-component programmable RNA-guided RNA-targeting CRISPR effector”; Science; DOI: 10.1126/science.aaf5573; and Shmakov et al. (2015) “Discovery and Functional Characterization of Diverse Class 2 CRISPR-Cas Systems”, Molecular Cell, DOI: dx.doi.org/10.1016/j.molce1.2015.10.008; which are incorporated herein in their entirety by reference. Cas13b has been described in Smargon et al. (2017) “Cas13b Is a Type VI-B CRISPR-Associated RNA-Guided RNases Differentially Regulated by Accessory Proteins Csx27 and Csx28,” Molecular Cell. 65, 1-13; dx.doi.org/10.1016/j.molce1.2016.12.023., which is incorporated herein in its entirety by reference.

[0055] In certain embodiments, a protospacer adjacent motif (PAM) or PAM-like motif directs binding of the effector protein complex as disclosed herein to the target locus of interest. In some embodiments, the PAM may be a 5′ PAM (i.e., located upstream of the 5′ end of the protospacer). In other embodiments, the PAM may be a 3′ PAM (i.e., located downstream of the 5′ end of the protospacer). The term “PAM” may be used interchangeably with the term “PFS” or “protospacer flanking site” or “protospacer flanking sequence”.

[0056] In a preferred embodiment, the CRISPR effector protein may recognize a 3′ PAM. In certain embodiments, the CRISPR effector protein may recognize a 3′ PAM which is 5′H, wherein H is A, C or U. In certain embodiments, the effector protein may be Leptotrichia shahii C2c2p, more preferably Leptotrichia shahii DSM 19757 C2c2, and the 3′ PAM is a 5′ H.

[0057] In the context of formation of a CRISPR complex, “target molecule” or “target sequence” or “target nucleic acid” refers to a molecule harboring a sequence, or a sequence to which a guide sequence is designed to have complementarity, where hybridization between a target sequence and a guide sequence promotes the formation of a CRISPR complex. A target sequence may comprise RNA polynucleotides. The term “target RNA” refers to a RNA polynucleotide being or comprising the target sequence. In other words, the target RNA may be a RNA polynucleotide or a part of a RNA polynucleotide to which a part of the gRNA, i.e. the guide sequence, is designed to have complementarity and to which the effector function mediated by the complex comprising CRISPR effector protein and a gRNA is to be directed. In some embodiments, a target sequence is located in the nucleus or cytoplasm of a cell. A target sequence may comprise DNA polynucleotides.

[0058] As such, a CRISPR system may comprise RNA-targeting effector proteins. A CRISPR system may comprise DNA-targeting effector proteins. In some embodiments, a CRISPR system may comprise a combination of RNA- and DNA-targeting effector proteins, or effector proteins that target both RNA and DNA.

[0059] The nucleic acid molecule encoding a CRISPR effector protein, in particular C2c2, is advantageously codon optimized CRISPR effector protein. An example of a codon optimized sequence, is in this instance a sequence optimized for expression in eukaryotes, e.g., humans (i.e. being optimized for expression in humans), or for another eukaryote, animal or mammal as herein discussed; see, e.g., SaCas9 human codon optimized sequence in International Patent Publication No. WO 2014/093622 (PCT/US2013/074667). Whilst this is preferred, it will be appreciated that other examples are possible and codon optimization for a host species other than human, or for codon optimization for specific organs is known. In some embodiments, an enzyme coding sequence encoding a CRISPR effector protein is a codon optimized for expression in particular cells, such as eukaryotic cells. The eukaryotic cells may be those of or derived from a particular organism, such as a plant or a mammal, including but not limited to human, or non-human eukaryote or animal or mammal as herein discussed, e.g., mouse, rat, rabbit, dog, livestock, or non-human mammal or primate. In some embodiments, processes for modifying the germ line genetic identity of human beings and/or processes for modifying the genetic identity of animals which are likely to cause them suffering without any substantial medical benefit to man or animal, and also animals resulting from such processes, may be excluded. In general, codon optimization refers to a process of modifying a nucleic acid sequence for enhanced expression in the host cells of interest by replacing at least one codon (e.g. about or more than about 1, 2, 3, 4, 5, 10, 15, 20, 25, 50, or more codons) of the native sequence with codons that are more frequently or most frequently used in the genes of that host cell while maintaining the native amino acid sequence. Various species exhibit particular bias for certain codons of a particular amino acid. Codon bias (differences in codon usage between organisms) often correlates with the efficiency of translation of messenger RNA (mRNA), which is in turn believed to be dependent on, among other things, the properties of the codons being translated and the availability of particular transfer RNA (tRNA) molecules. The predominance of selected tRNAs in a cell is generally a reflection of the codons used most frequently in peptide synthesis. Accordingly, genes can be tailored for optimal gene expression in a given organism based on codon optimization. Codon usage tables are readily available, for example, at the “Codon Usage Database” available at kazusa.orjp/codon/ and these tables can be adapted in a number of ways. See Nakamura, Y., et al. “Codon usage tabulated from the international DNA sequence databases: status for the year 2000” Nucl. Acids Res. 28:292 (2000). Computer algorithms for codon optimizing a particular sequence for expression in a particular host cell are also available, such as Gene Forge (Aptagen; Jacobus, PA), are also available. In some embodiments, one or more codons (e.g. 1, 2, 3, 4, 5, 10, 15, 20, 25, 50, or more, or all codons) in a sequence encoding a Cas correspond to the most frequently used codon for a particular amino acid.

[0060] In certain embodiments, the methods as described herein may comprise providing a Cas transgenic cell, in particular a C2c2 transgenic cell, in which one or more nucleic acids encoding one or more guide RNAs are provided or introduced operably connected in the cell with a regulatory element comprising a promoter of one or more gene of interest. As used herein, the term “Cas transgenic cell” refers to a cell, such as a eukaryotic cell, in which a Cas gene has been genomically integrated. The nature, type, or origin of the cell are not particularly limiting according to the present invention. Also the way the Cas transgene is introduced in the cell may vary and can be any method as is known in the art. In certain embodiments, the Cas transgenic cell is obtained by introducing the Cas transgene in an isolated cell. In certain other embodiments, the Cas transgenic cell is obtained by isolating cells from a Cas transgenic organism. By means of example, and without limitation, the Cas transgenic cell as referred to herein may be derived from a Cas transgenic eukaryote, such as a Cas knock-in eukaryote. Reference is made to International Patent Publication No. WO 2014/093622 (PCT/US13/74667), incorporated herein by reference. Methods of US Patent Publication Nos. 20120017290 and 20110265198 assigned to Sangamo BioSciences, Inc. directed to targeting the Rosa locus may be modified to utilize the CRISPR Cas system of the present invention. Methods of US Patent Publication No. 20130236946 assigned to Cellectis directed to targeting the Rosa locus may also be modified to utilize the CRISPR Cas system of the present invention. By means of further example reference is made to Platt et. al. (Cell; 159(2):440-455 (2014)), describing a Cas9 knock-in mouse, which is incorporated herein by reference. The Cas transgene can further comprise a Lox-Stop-polyA-Lox(LSL) cassette thereby rendering Cas expression inducible by Cre recombinase. Alternatively, the Cas transgenic cell may be obtained by introducing the Cas transgene in an isolated cell. Delivery systems for transgenes are well known in the art. By means of example, the Cas transgene may be delivered in for instance eukaryotic cell by means of vector (e.g., AAV, adenovirus, lentivirus) and/or particle and/or nanoparticle delivery, as also described herein elsewhere.

[0061] It will be understood by the skilled person that the cell, such as the Cas transgenic cell, as referred to herein may comprise further genomic alterations besides having an integrated Cas gene or the mutations arising from the sequence specific action of Cas when complexed with RNA capable of guiding Cas to a target locus.

[0062] In certain aspects the invention involves vectors, e.g. for delivering or introducing in a cell Cas and/or RNA capable of guiding Cas to a target locus (i.e. guide RNA), but also for propagating these components (e.g. in prokaryotic cells). A used herein, a “vector” is a tool that allows or facilitates the transfer of an entity from one environment to another. It is a replicon, such as a plasmid, phage, or cosmid, into which another DNA segment may be inserted so as to bring about the replication of the inserted segment. Generally, a vector is capable of replication when associated with the proper control elements. In general, the term “vector” refers to a nucleic acid molecule capable of transporting another nucleic acid to which it has been linked. Vectors include, but are not limited to, nucleic acid molecules that are single-stranded, double-stranded, or partially double-stranded; nucleic acid molecules that comprise one or more free ends, no free ends (e.g. circular); nucleic acid molecules that comprise DNA, RNA, or both; and other varieties of polynucleotides known in the art. One type of vector is a “plasmid,” which refers to a circular double stranded DNA loop into which additional DNA segments can be inserted, such as by standard molecular cloning techniques. Another type of vector is a viral vector, wherein virally-derived DNA or RNA sequences are present in the vector for packaging into a virus (e.g. retroviruses, replication defective retroviruses, adenoviruses, replication defective adenoviruses, and adeno-associated viruses (AAVs)). Viral vectors also include polynucleotides carried by a virus for transfection into a host cell. Certain vectors are capable of autonomous replication in a host cell into which they are introduced (e.g. bacterial vectors having a bacterial origin of replication and episomal mammalian vectors). Other vectors (e.g., non-episomal mammalian vectors) are integrated into the genome of a host cell upon introduction into the host cell, and thereby are replicated along with the host genome. Moreover, certain vectors are capable of directing the expression of genes to which they are operatively-linked. Such vectors are referred to herein as “expression vectors.” Common expression vectors of utility in recombinant DNA techniques are often in the form of plasmids.

[0063] Recombinant expression vectors can comprise a nucleic acid of the invention in a form suitable for expression of the nucleic acid in a host cell, which means that the recombinant expression vectors include one or more regulatory elements, which may be selected on the basis of the host cells to be used for expression, that is operatively-linked to the nucleic acid sequence to be expressed. Within a recombinant expression vector, “operably linked” is intended to mean that the nucleotide sequence of interest is linked to the regulatory element(s) in a manner that allows for expression of the nucleotide sequence (e.g. in an in vitro transcription/translation system or in a host cell when the vector is introduced into the host cell). With regards to recombination and cloning methods, mention is made of U.S. patent application Ser. No. 10/815,730, published Sep. 2, 2004 as US 2004-0171156 A1, the contents of which are herein incorporated by reference in their entirety. Thus, the embodiments disclosed herein may also comprise transgenic cells comprising the CRISPR effector system. In certain example embodiments, the transgenic cell may function as an individual discrete volume. In other words samples comprising a masking construct may be delivered to a cell, for example in a suitable delivery vesicle and if the target is present in the delivery vesicle the CRISPR effector is activated and a detectable signal generated.

[0064] The vector(s) can include the regulatory element(s), e.g., promoter(s). The vector(s) can comprise Cas encoding sequences, and/or a single, but possibly also can comprise at least 3 or 8 or 16 or 32 or 48 or 50 guide RNA(s) (e.g., sgRNAs) encoding sequences, such as 1-2, 1-3, 1-4 1-5, 3-6, 3-7, 3-8, 3-9, 3-10, 3-8, 3-16, 3-30, 3-32, 3-48, 3-50 RNA(s) (e.g., sgRNAs). In a single vector there can be a promoter for each RNA (e.g., sgRNA), advantageously when there are up to about 16 RNA(s); and, when a single vector provides for more than 16 RNA(s), one or more promoter(s) can drive expression of more than one of the RNA(s), e.g., when there are 32 RNA(s), each promoter can drive expression of two RNA(s), and when there are 48 RNA(s), each promoter can drive expression of three RNA(s). By simple arithmetic and well established cloning protocols and the teachings in this disclosure one skilled in the art can readily practice the invention as to the RNA(s) for a suitable exemplary vector such as AAV, and a suitable promoter such as the U6 promoter. For example, the packaging limit of AAV is ˜4.7 kb. The length of a single U6-gRNA (plus restriction sites for cloning) is 361 bp. Therefore, the skilled person can readily fit about 12-16, e.g., 13 U6-gRNA cassettes in a single vector. This can be assembled by any suitable means, such as a golden gate strategy used for TALE assembly (genome-engineering.org/taleffectors/). The skilled person can also use a tandem guide strategy to increase the number of U6-gRNAs by approximately 1.5 times, e.g., to increase from 12-16, e.g., 13 to approximately 18-24, e.g., about 19 U6-gRNAs. Therefore, one skilled in the art can readily reach approximately 18-24, e.g., about 19 promoter-RNAs, e.g., U6-gRNAs in a single vector, e.g., an AAV vector. A further means for increasing the number of promoters and RNAs in a vector is to use a single promoter (e.g., U6) to express an array of RNAs separated by cleavable sequences. And an even further means for increasing the number of promoter-RNAs in a vector, is to express an array of promoter-RNAs separated by cleavable sequences in the intron of a coding sequence or gene; and, in this instance it is advantageous to use a polymerase II promoter, which can have increased expression and enable the transcription of long RNA in a tissue specific manner. (see, e.g., nar.oxfordjournals.org/content/34/7/e53. short and nature.com/mt/journal/v16/n9/abs/mt2008144a.html). In an advantageous embodiment, AAV may package U6 tandem gRNA targeting up to about 50 genes. Accordingly, from the knowledge in the art and the teachings in this disclosure the skilled person can readily make and use vector(s), e.g., a single vector, expressing multiple RNAs or guides under the control or operatively or functionally linked to one or more promoters—especially as to the numbers of RNAs or guides discussed herein, without any undue experimentation.

[0065] The guide RNA(s) encoding sequences and/or Cas encoding sequences, can be functionally or operatively linked to regulatory element(s) and hence the regulatory element(s) drive expression. The promoter(s) can be constitutive promoter(s) and/or conditional promoter(s) and/or inducible promoter(s) and/or tissue specific promoter(s). The promoter can be selected from the group consisting of RNA polymerases, pol I, pol II, pol III, T7, U6, H1, retroviral Rous sarcoma virus (RSV) LTR promoter, the cytomegalovirus (CMV) promoter, the SV40 promoter, the dihydrofolate reductase promoter, the β-actin promoter, the phosphoglycerol kinase (PGK) promoter, and the EF1α promoter. An advantageous promoter is the promoter is U6.

[0066] In some embodiments, one or more elements of a nucleic acid-targeting system is derived from a particular organism comprising an endogenous CRISPR RNA-targeting system. In certain example embodiments, the effector protein CRISPR RNA-targeting system comprises at least one HEPN domain, including but not limited to the HEPN domains described herein, HEPN domains known in the art, and domains recognized to be HEPN domains by comparison to consensus sequence motifs. Several such domains are provided herein. In one non-limiting example, a consensus sequence can be derived from the sequences of C2c2 or Cas13b orthologs provided herein. In certain example embodiments, the effector protein comprises a single HEPN domain. In certain other example embodiments, the effector protein comprises two HEPN domains.

[0067] In one example embodiment, the effector protein comprises one or more HEPN domains comprising a RxxxxH motif sequence. The RxxxxH motif sequence can be, without limitation, from a HEPN domain described herein or a HEPN domain known in the art. RxxxxH motif sequences further include motif sequences created by combining portions of two or more HEPN domains. As noted, consensus sequences can be derived from the sequences of the orthologs disclosed in U.S. Provisional Patent Application 62/432,240 entitled “Novel CRISPR Enzymes and Systems,” U.S. Provisional Patent Application 62/471,710 entitled “Novel Type VI CRISPR Orthologs and Systems” filed on Mar. 15, 2017, and U.S. Provisional Patent Application entitled “Novel Type VI CRISPR Orthologs and Systems,” labeled as attorney docket number 47627-05-2133 and filed on Apr. 12, 2017.

[0068] In an embodiment of the invention, a HEPN domain comprises at least one RxxxxH motif comprising the sequence of R(N/H/K)X1X2X3H (SEQ ID NO:1-3). In an embodiment of the invention, a HEPN domain comprises a RxxxxH motif comprising the sequence of R(N/H)X1X2X3H (SEQ ID NO:145). In an embodiment of the invention, a HEPN domain comprises the sequence of R(N/K)X1X2X3H (SEQ ID NO:4-5). In certain embodiments, X1 is R, S, D, E, Q, N, G, Y, or H. In certain embodiments, X2 is I, S, T, V, or L. In certain embodiments, X3 is L, F, N, Y, V, I, S, D, E, or A.

[0069] Embodiments disclosed herein utilize Cas proteins possessing non-specific nuclease collateral activity to cleave detectable reporters upon target recognition, providing sensitive and specific diagnostics, including single nucleotide variants, detection based on rRNA sequences, screening for drug resistance, monitoring microbe outbreaks, genetic perturbations, and screening of environmental samples, as described, for example, in PCT/US18/054472 filed Oct. 22, 2018 at [0183]-[0327], incorporated herein by reference. Reference is made to WO 2017/219027, WO2018/107129, US20180298445, US 2018-0274017, US 2018-0305773, WO 2018/170340, U.S. application Ser. No. 15/922,837, filed Mar. 15, 2018 entitled “Devices for CRISPR Effector System Based Diagnostics”, PCT/US18/50091, filed Sep. 7, 2018 “Multi-Effector CRISPR Based Diagnostic Systems”, PCT/US18/66940 filed Dec. 20, 2018 entitled “CRISPR Effector System Based Multiplex Diagnostics”, PCT/US18/054472 filed Oct. 4, 2018 entitled “CRISPR Effector System Based Diagnostic”, U.S. Provisional 62/740,728 filed Oct. 3, 2018 entitled “CRISPR Effector System Based Diagnostics for Hemorrhagic Fever Detection”, U.S. Provisional 62/690,278 filed Jun. 26, 2018 and U.S. Provisional 62/767,059 filed Nov. 14, 2018 both entitled “CRISPR Double Nickase Based Amplification, Compositions, Systems and Methods”, U.S. Provisional 62/690,160 filed Jun. 26, 2018 and 62,767,077 filed Nov. 14, 2018, both entitled “CRISPR/CAS and Transposase Based Amplification Compositions, Systems, And Methods”, U.S. Provisional 62/690,257 filed Jun. 26, 2018 and 62/767,052 filed Nov. 14, 2018 both entitled “CRISPR Effector System Based Amplification Methods, Systems, And Diagnostics”, U.S. Provisional 62/767,076 filed Nov. 14, 2018 entitled “Multiplexing Highly Evolving Viral Variants With SHERLOCK” and 62/767,070 filed Nov. 14, 2018 entitled “Droplet SHERLOCK.” Reference is further made to WO2017/127807, WO2017/184786, WO 2017/184768, WO 2017/189308, WO 2018/035388, WO 2018/170333, WO 2018/191388, WO 2018/213708, WO 2019/005866, PCT/US18/67328 filed December 21, 2018 entitled “Novel CRISPR Enzymes and Systems”, PCT/US18/67225 filed Dec. 21, 2018 entitled “Novel CRISPR Enzymes and Systems” and PCT/US18/67307 filed Dec. 21, 2018 entitled “Novel CRISPR Enzymes and Systems”, U.S. 62/712,809 filed Jul. 31, 2018 entitled “Novel CRISPR Enzymes and Systems”, U.S. 62/744,080 filed Oct. 10, 2018 entitled “Novel Cas12b Enzymes and Systems” and U.S. 62/751,196 filed Oct. 26 2018 entitled “Novel Cas12b Enzymes and Systems”, U.S. Pat. No. 715,640 filed August 7, 2-18 entitled “Novel CRISPR Enzymes and Systems”, WO 2016/205711, U.S. Pat. No. 9,790,490, WO 2016/205749, WO 2016/205764, WO 2017/070605, WO 2017/106657, and WO 2016/149661, WO2018/035387, WO2018/194963, Cox DBT, et al., RNA editing with CRISPR-Cas13, Science. 2017 Nov. 24; 358(6366):1019-1027; Gootenberg J S, et al., Multiplexed and portable nucleic acid detection platform with Cas13, Cas12a, and Csm6., Science. 2018 Apr. 27; 360(6387):439-444; Gootenberg J S, et al., Nucleic acid detection with CRISPR-Cas13a/C2c2., Science. 2017 Apr. 28; 356(6336):438-442; Abudayyeh OO, et al., RNA targeting with CRISPR-Cas13, Nature. 2017 Oct. 12; 550(7675):280-284; Smargon A A, et al., Cas13b Is a Type VI-B CRISPR-Associated RNA-Guided RNase Differentially Regulated by Accessory Proteins Csx27 and Csx28. Mol Cell. 2017 Feb. 16; 65(4):618-630.e7; Abudayyeh O, et al., C2c2 is a single-component programmable RNA-guided RNA-targeting CRISPR effector, Science. 2016 Aug. 5; 353(6299):aaf5573; Yang L, et al., Engineering and optimising deaminase fusions for genome editing. Nat Commun. 2016 Nov. 2; 7:13330, Myhrvold et al., Field deployable viral diagnostics using CRISPR-Cas13, Science 2018 360, 444-448, Shmakov et al. “Diversity and evolution of class 2 CRISPR-Cas systems,” Nat Rev Microbiol. 2017 15(3):169-182, each of which is incorporated herein by reference in its entirety.

[0070] When using two or more CRISPR effector systems, the CRISPR effector systems may be RNA-targeting effector proteins, DNA-targeting effector proteins, or a combination thereof. The RNA-targeting effector proteins may be a Type VI Cas protein, such as Cas13 protein, including Cas13b, Cas13c, or Cas13d. The DNA-targeting effector protein may be a Type V Cas protein, such as Cas12a (Cpf1), Cas12b (C2c2), Cas12c (C2c3), Cas X, Cas Y, or Cas14.

[0071] In general, a CRISPR-Cas or CRISPR system as used in herein and in documents, such as WO 2014/093622 (PCT/US2013/074667), refers collectively to transcripts and other elements involved in the expression of or directing the activity of CRISPR-associated (“Cas”) genes, including sequences encoding a Cas gene, a tracr (trans-activating CRISPR) sequence (e.g. tracrRNA or an active partial tracrRNA), a tracr-mate sequence (encompassing a “direct repeat” and a tracrRNA-processed partial direct repeat in the context of an endogenous CRISPR system), a guide sequence (also referred to as a “spacer” in the context of an endogenous CRISPR system), or “RNA(s)” as that term is herein used (e.g., RNA(s) to guide Cas, such as Cas9, e.g. CRISPR RNA and transactivating (tracr) RNA or a single guide RNA (sgRNA) (chimeric RNA)) or other sequences and transcripts from a CRISPR locus. In general, a CRISPR system is characterized by elements that promote the formation of a CRISPR complex at the site of a target sequence (also referred to as a protospacer in the context of an endogenous CRISPR system). See, e.g, Shmakov et al. (2015) “Discovery and Functional Characterization of Diverse Class 2 CRISPR-Cas Systems”, Molecular Cell, DOI: dx.doi.org/10.1016/j .molce1.2015.10.008.

RNA targeting Cas protein

[0072] In an aspect, the invention utilizes an RNA targeting Cas protein. In certain embodiments, protospacer flanking site, or protospacer flanking sequence (PFS) directs binding of the effector proteins (.e.g Type VI) as disclosed herein to the target locus of interest. A PFS is a region that can affect the efficacy of Cas13a mediated targeting, and may be adjacent to the protospacer target in certain Cas13a proteins, while other orthologs do not require a specific PFS.In a preferred embodiment, the CRISPR effector protein may recognize a 3′ PFS. In certain embodiments, the CRISPR effector protein may recognize a 3′ PFS which is 5′H, wherein H is A, C or U. See, e.g. Abudayyeh, 2016. In certain embodiments, the effector protein may be Leptotrichia shahii Cas13p, more preferably Leptotrichia shahii DSM 19757 Cas13, and the 3′ PFS is a 5′ H. In an aspect, design of guides can utilize the known PFS preferences of enzymes, for example, 3′ H for LwaCas13a and 5′-D/3′-NAA for CcaCas3b.

[0073] In the context of formation of a CRISPR complex, “target molecule” or “target sequence” or “target nucleic acid” refers to a molecule harboring a sequence, or a sequence to which a guide sequence is designed to have complementarity, where hybridization between a target sequence and a guide sequence promotes the formation of a CRISPR complex. A target sequence may comprise RNA polynucleotides. The term “target RNA” refers to a RNA polynucleotide being or comprising the target sequence. In other words, the target RNA may be a RNA polynucleotide or a part of a RNA polynucleotide to which a part of the gRNA, i.e. the guide sequence, is designed to have complementarity and to which the effector function mediated by the complex comprising CRISPR effector protein and a gRNA is to be directed. In some embodiments, a target sequence is located in the nucleus or cytoplasm of a cell. A target sequence may comprise DNA polynucleotides.

[0074] As such, a CRISPR system may comprise RNA-targeting effector proteins. A CRISPR system may comprise DNA-targeting effector proteins. In some embodiments, a CRISPR system may comprise a combination of RNA- and DNA-targeting effector proteins, or effector proteins that target both RNA and DNA.

[0075] In some embodiments, one or more elements of a nucleic acid-targeting system is derived from a particular organism comprising an endogenous CRISPR RNA-targeting system. In certain example embodiments, the effector protein CRISPR RNA-targeting system comprises at least one HEPN domain, including but not limited to the HEPN domains described herein, HEPN domains known in the art, and domains recognized to be HEPN domains by comparison to consensus sequence motifs. Several such domains are provided herein. In one non-limiting example, a consensus sequence can be derived from the sequences of Cas13a or Cas13b orthologs provided herein. In certain example embodiments, the effector protein comprises a single HEPN domain. In certain other example embodiments, the effector protein comprises two HEPN domains.

[0076] In one example embodiment, the effector protein comprises one or more HEPN domains comprising a RxxxxH motif sequence. The RxxxxH motif sequence can be, without limitation, from a HEPN domain described herein or a HEPN domain known in the art. RxxxxH motif sequences further include motif sequences created by combining portions of two or more HEPN domains. As noted, consensus sequences can be derived from the sequences of the orthologs disclosed in U.S. Provisional Patent Application 62/432,240 entitled “Novel CRISPR Enzymes and Systems,” U.S. Provisional Patent Application 62/471,710 entitled “Novel Type VI CRISPR Orthologs and Systems” filed on Mar. 15, 2017, and U.S. Provisional Patent Application entitled “Novel Type VI CRISPR Orthologs and Systems,” labeled as attorney docket number 47627-05-2133 and filed on Apr. 12, 2017.

[0077] In an embodiment of the invention, a HEPN domain comprises at least one RxxxxH motif comprising the sequence of R(N/H/K)X1X2X3H (SEQ ID NO:XX). In an embodiment of the invention, a HEPN domain comprises a RxxxxH motif comprising the sequence of R(N/H)X1X2X3H (SEQ ID NO:XX). In an embodiment of the invention, a HEPN domain comprises the sequence of R(N/K)X1X2X3H (SEQ ID NO:XX). In certain embodiments, X1 is R, S, D, E, Q, N, G, Y, or H. In certain embodiments, X2 is I, S, T, V, or L. In certain embodiments, X3 is L, F, N, Y, V, I, S, D, E, or A.

[0078] In particular embodiments, the Type VI RNA-targeting Cas enzyme is Cas13a. In other example embodiments, the Type VI RNA-targeting Cas enzyme is Cas13b. In certain embodiments, the Cas13b protein is from an organism of a genus selected from the group consisting of: Bergeyella, Prevotella, Porphyromonas, Bacterioides, Alistipes, Riemerella, Myroides, Capnocytophaga, Porphyromonas, Flavobacterium, Porphyromonas, Chryseobacterium, Paludibacter, Psychroflexus, Riemerella, Phaeodactylibacter, Sinomicrobium, Reichenbachiella.

[0079] In particular embodiments, the homologue or orthologue of a Type VI protein such as Cas13a as referred to herein has a sequence homology or identity of at least 30%, or at least 40%, or at least 50%, or at least 60%, or at least 70%, or at least 80%, more preferably at least 85%, even more preferably at least 90%, such as for instance at least 95% with a Type VI protein such as Cas13a (e.g., based on the wild-type sequence of any of Leptotrichia shahii Cas13a, Lachnospiraceae bacterium MA2020 Cas13a, Lachnospiraceae bacterium NK4A179 Cas13a, Clostridium aminophilum (DSM 10710) Cas13a, Carnobacterium gallinarum (DSM 4847) Cas13, Paludibacter propionicigenes (WB4) Cas13, Listeria weihenstephanensis (FSL R9-0317) Cas13, Listeriaceae bacterium (FSL M6-0635) Cas13, Listeria newyorkensis (FSL M6-0635) Cas13, Leptotrichia wadei (F0279) Cas13, Rhodobacter capsulatus (SB 1003) Cas13, Rhodobacter capsulatus (R121) Cas13, Rhodobacter capsulatus (DE442) Cas13, Leptotrichia wadei (Lw2) Cas13, or Listeria seeligeri Cas13). In further embodiments, the homologue or orthologue of a Type VI protein such as Cas13 as referred to herein has a sequence identity of at least 30%, or at least 40%, or at least 50%, or at least 60%, or at least 70%, or at least 80%, more preferably at least 85%, even more preferably at least 90%, such as for instance at least 95% with the wild type Cas13 (e.g., based on the wild-type sequence of any of Leptotrichia shahii Cas13, Lachnospiraceae bacterium MA2020 Cas13, Lachnospiraceae bacterium NK4A179 Cas13, Clostridium aminophilum (DSM 10710) Cas13, Carnobacterium gallinarum (DSM 4847) Cas13, Paludibacter propionicigenes (WB4) Cas13, Listeria weihenstephanensis (FSL R9-0317) Cas13, Listeriaceae bacterium (FSL M6-0635) Cas13, Listeria newyorkensis (FSL M6-0635) Cas13, Leptotrichia wadei (F0279) Cas13, Rhodobacter capsulatus (SB 1003) Cas13, Rhodobacter capsulatus (R121) Cas13, Rhodobacter capsulatus (DE442) Cas13, Leptotrichia wadei (Lw2) Cas13, or Listeria seeligeri Cas13).

[0080] In certain other example embodiments, the CRISPR system the effector protein is a Cas13 nuclease. The activity of Cas13 may depend on the presence of two HEPN domains. These have been shown to be RNase domains, i.e. nuclease (in particular an endonuclease) cutting RNA. Cas13a HEPN may also target DNA, or potentially DNA and/or RNA. On the basis that the HEPN domains of Cas13a are at least capable of binding to and, in their wild-type form, cutting RNA, then it is preferred that the Cas13a effector protein has RNase function. Regarding Cas13a CRISPR systems, reference is made to U.S. Provisional 62/351,662 filed on Jun. 17, 2016 and U.S. Provisional 62/376,377 filed on Aug. 17, 2016. Reference is also made to U.S. Provisional 62/351,803 filed on Jun. 17, 2016. Reference is also made to U.S. Provisional entitled “Novel Crispr Enzymes and Systems” filed Dec. 8, 2016 bearing Broad Institute No. 10035.PA4 and Attorney Docket No. 47627.03.2133. Reference is further made to East-Seletsky et al. “Two distinct RNase activities of CRISPR-C2c2 enable guide-RNA processing and RNA detection” Nature doi:10/1038/nature19802 and Abudayyeh et al. “C2c2 is a single-component programmable RNA-guided RNA targeting CRISPR effector” bioRxiv doi:10.1101/054742.

[0081] RNase function in CRISPR systems is known, for example mRNA targeting has been reported for certain type III CRISPR-Cas systems (Hale et al., 2014, Genes Dev, vol. 28, 2432-2443; Hale et al., 2009, Cell, vol. 139, 945-956; Peng et al., 2015, Nucleic acids research, vol. 43, 406-417) and provides significant advantages. In the Staphylococcus epidermis type III-A system, transcription across targets results in cleavage of the target DNA and its transcripts, mediated by independent active sites within the Cas10-Csm ribonucleoprotein effector protein complex (see, Samai et al., 2015, Cell, vol. 151, 1164-1174). A CRISPR-Cas system, composition or method targeting RNA via the present effector proteins is thus provided.

[0082] In an embodiment, the Cas protein may be a Cas13a ortholog of an organism of a genus which includes but is not limited to Leptotrichia, Listeria, Corynebacter, Sutterella, Legionella, Treponema, Filifactor, Eubacterium, Streptococcus, Lactobacillus, Mycoplasma, Bacteroides, Flaviivola, Flavobacterium, Sphaerochaeta, Azospirillum, Gluconacetobacter, Neisseria, Roseburia, Parvibaculum, Staphylococcus, Nitratifractor, Mycoplasma and Campylobacter. Species of organism of such a genus can be as otherwise herein discussed.

[0083] It will be appreciated that any of the functionalities described herein may be engineered into CRISPR enzymes from other orthologs, including chimeric enzymes comprising fragments from multiple orthologs. Examples of such orthologs are described elsewhere herein. Thus, chimeric enzymes may comprise fragments of CRISPR enzyme orthologs of an organism which includes but is not limited to Leptotrichia, Listeria, Corynebacter, Sutterella, Legionella, Treponema, Filifactor, Eubacterium, Streptococcus, Lactobacillus, Mycoplasma, Bacteroides, Flaviivola, Flavobacterium, Sphaerochaeta, Azospirillum, Gluconacetobacter, Neisseria, Roseburia, Parvibaculum, Staphylococcus, Nitratifractor, Mycoplasma and Campylobacter. A chimeric enzyme can comprise a first fragment and a second fragment, and the fragments can be of CRISPR enzyme orthologs of organisms of genera herein mentioned or of species herein mentioned; advantageously the fragments are from CRISPR enzyme orthologs of different species.

[0084] In embodiments, the Cas13a protein as referred to herein also encompasses a functional variant of Cas13a or a homologue or an orthologue thereof. A “functional variant” of a protein as used herein refers to a variant of such protein which retains at least partially the activity of that protein. Functional variants may include mutants (which may be insertion, deletion, or replacement mutants), including polymorphs, etc. Also included within functional variants are fusion products of such protein with another, usually unrelated, nucleic acid, protein, polypeptide or peptide. Functional variants may be naturally occurring or may be man-made. Advantageous embodiments can involve engineered or non-naturally occurring Type VI RNA-targeting effector protein.

[0085] In an embodiment, nucleic acid molecule(s) encoding the Cas13 or an ortholog or homolog thereof, may be codon-optimized for expression in a eukaryotic cell. A eukaryote can be as herein discussed. Nucleic acid molecule(s) can be engineered or non-naturally occurring.

[0086] In an embodiment, the Cas13a or an ortholog or homolog thereof, may comprise one or more mutations (and hence nucleic acid molecule(s) coding for same may have mutation(s). The mutations may be artificially introduced mutations and may include but are not limited to one or more mutations in a catalytic domain. Examples of catalytic domains with reference to a Cas9 enzyme may include but are not limited to RuvC I, RuvC II, RuvC III and HNH domains.

[0087] In an embodiment, the Cas13a or an ortholog or homolog thereof, may comprise one or more mutations. The mutations may be artificially introduced mutations and may include but are not limited to one or more mutations in a catalytic domain. Examples of catalytic domains with reference to a Cas enzyme may include but are not limited to HEPN domains.

[0088] In an embodiment, the Cas13a or an ortholog or homolog thereof, may be used as a generic nucleic acid binding protein with fusion to or being operably linked to a functional domain. Exemplary functional domains may include but are not limited to translational initiator, translational activator, translational repressor, nucleases, in particular ribonucleases, a spliceosome, beads, a light inducible/controllable domain or a chemically inducible/controllable domain.

[0089] In certain example embodiments, the Cas13a effector protein may be from an organism selected from the group consisting of; Leptotrichia, Listeria, Corynebacter, Sutterella, Legionella, Treponema, Filifactor, Eubacterium, Streptococcus, Lactobacillus, Mycoplasma, Bacteroides, Flaviivola, Flavobacterium, Sphaerochaeta, Azospirillum, Gluconacetobacter, Neisseria, Roseburia, Parvibaculum, Staphylococcus, Nitratifractor, Mycoplasma, and Campylobacter.

[0090] In certain embodiments, the effector protein may be a Listeria sp. Cas13p, preferably Listeria seeligeria Cas13p, more preferably Listeria seeligeria serovar 1/2b str. SLCC3954 Cas13p and the crRNA sequence may be 44 to 47 nucleotides in length, with a 5′ 29-nt direct repeat (DR) and a 15-nt to 18-nt spacer.

[0091] In certain embodiments, the effector protein may be a Leptotrichia sp. Cas13p, preferably Leptotrichia shahii Cas13p, more preferably Leptotrichia shahii DSM 19757 Cas13p and the crRNA sequence may be 42 to 58 nucleotides in length, with a 5′ direct repeat of at least 24 nt, such as a 5′ 24-28-nt direct repeat (DR) and a spacer of at least 14 nt, such as a 14-nt to 28-nt spacer, or a spacer of at least 18 nt, such as 19, 20, 21, 22, or more nt, such as 18-28, 19-28, 20-28, 21-28, or 22-28 nt.

[0092] In certain example embodiments, the effector protein may be a Leptotrichia sp., Leptotrichia wadei F0279, or a Listeria sp., preferably Listeria newyorkensis FSL M6-0635.

[0093] In certain example embodiments, the Cas13 effector proteins of the invention include, without limitation, the following 21 ortholog species (including multiple CRISPR loci: Leptotrichia shahii; Leptotrichia wadei (Lw2); Listeria seeligeri; Lachnospiraceae bacterium MA2020; Lachnospiraceae bacterium NK4A179; [Clostridium] aminophilum DSM 10710; Carnobacterium gallinarum DSM 4847; Carnobacterium gallinarum DSM 4847 (second CRISPR Loci); Paludibacter propionicigenes WB4; Listeria weihenstephanensis FSL R9-0317; Listeriaceae bacterium FSL M6-0635; Leptotrichia wadei F0279; Rhodobacter capsulatus SB 1003; Rhodobacter capsulatus R121; Rhodobacter capsulatus DE442; Leptotrichia buccalis C-1013-b; Herbinix hemicellulosilytica; [Eubacterium] rectale; Eubacteriaceae bacterium CHKCI004; Blautia sp. Marseille-P2398; and Leptotrichia sp. oral taxon 879 str. F0557. Twelve (12) further non-limiting examples are: Lachnospiraceae bacterium NK4A144; Chloroflexus aggregans; Demequina aurantiaca; Thalassospira sp. TSL5-1; Pseudobutyrivibrio sp. OR37; Butyrivibrio sp. YAB3001; Blautia sp. Marseille-P2398; Leptotrichia sp. Marseille-P3007; Bacteroides ihuae; Porphyromonadaceae bacterium KH3CP3RA; Listeria riparia; and Insolitispirillum peregrinum.

[0094] In certain embodiments, the Cas13 protein according to the invention is or is derived from one of the orthologues as described herein, or is a chimeric protein of two or more of the orthologues as described herein, or is a mutant or variant of one of the orthologues as described in below (or a chimeric mutant or variant), including dead Cas13, split Cas13, destabilized Cas13, etc. as defined herein elsewhere, with or without fusion with a heterologous/functional domain.

[0095] In certain example embodiments, the Cas13a effector protein is from an organism of a genus selected from the group consisting of: Leptotrichia, Listeria, Corynebacter, Sutterella, Legionella, Treponema, Filifactor, Eubacterium, Streptococcus, Lactobacillus, Mycoplasma, Bacteroides, Flaviivola, Flavobacterium, Sphaerochaeta, Azospirillum, Gluconacetobacter, Neisseria, Roseburia, Parvibaculum, Staphylococcus, Nitratifractor, Mycoplasma, Campylobacter, and Lachnospira.

[0096] In an embodiment of the invention, there is provided an effector protein which comprises an amino acid sequence having at least 80% sequence homology to the wild-type sequence of any of Leptotrichia shahii Cas13, Lachnospiraceae bacterium MA2020 Cas13, Lachnospiraceae bacterium NK4A179 Cas13, Clostridium aminophilum (DSM 10710) Cas13, Carnobacterium gallinarum (DSM 4847) Cas13, Paludibacter propionicigenes (WB4) Cas13, Listeria weihenstephanensis (FSL R9-0317) Cas13, Listeriaceae bacterium (FSL M6-0635) Cas13, Listeria newyorkensis (FSL M6-0635) Cas13, Leptotrichia wadei (F0279) Cas13, Rhodobacter capsulatus (SB 1003) Cas13, Rhodobacter capsulatus (R121) Cas13, Rhodobacter capsulatus (DE442) Cas13, Leptotrichia wadei (Lw2) Cas13, or Listeria seeligeri Cas13. According to the invention, a consensus sequence can be generated from multiple Cas13 orthologs, which can assist in locating conserved amino acid residues, and motifs, including but not limited to catalytic residues and HEPN motifs in Cas13 orthologs that mediate Cas13 function. One such consensus sequence, generated from selected orthologs.

[0097] In an embodiment of the invention, the effector protein comprises an amino acid sequence having at least 80% sequence homology to a Type VI effector protein consensus sequence including but not limited to a consensus sequence described herein.

[0098] In another non-limiting example, a sequence alignment tool to assist generation of a consensus sequence and identification of conserved residues is the MUSCLE alignment tool (www.ebi.ac.uk/Tools/msa/muscle/). For example, using MUSCLE, the following amino acid locations conserved among Cas13a orthologs can be identified in Leptotrichia wadei Cas13a:K2; K5; V6; E301; L331; 1335; N341; G351; K352; E375; L392; L396; D403; F446; I466; I470; R474 (HEPN); H475; H479 (HEPN), E508; P556; L561; 1595; Y596; F600; Y669; I673; F681; L685; Y761; L676; L779; Y782; L836; D847; Y863; L869; 1872; K879; I933; L954; I958; R961; Y965; E970; R971; D972; R1046 (HEPN), H1051 (HEPN), Y1075; D1076; K1078; K1080; I1083; I1090.

[0099] In certain example embodiments, the RNA-targeting effector protein is a Type VI-B effector protein, such as Cas13b and Group 29 or Group 30 proteins. In certain example embodiments, the RNA-targeting effector protein comprises one or more HEPN domains. In certain example embodiments, the RNA-targeting effector protein comprises a C-terminal HEPN domain, a N-terminal HEPN domain, or both. Regarding example Type VI-B effector proteins that may be used in the context of this invention, reference is made to U.S. application Ser. No. 15/331,792 entitled “Novel CRISPR Enzymes and Systems” and filed Oct. 21, 2016, International Patent Application No. PCT/US2016/058302 entitled “Novel CRISPR Enzymes and Systems”, and filed Oct. 21, 2016, and Smargon et al. “Cas13b is a Type VI-B CRISPR-associated RNA-Guided RNase differentially regulated by accessory proteins Csx27 and Csx28” Molecular Cell, 65, 1-13 (2017); dx.doi.org/10.1016/j.molce1.2016.12.023. In certain example embodiments, the Cas13b effector protein is, or comprises an amino acid sequence having at least 80% sequence homology to any of the sequences of Table 1 of International Patent Application No. PCT/US2016/058302. Further reference is made to example Type VI-B effector proteins of U.S. Provisional Application Nos. 62/471,710, 62/566,829 and International Patent Publication No. WO2018/1703333, entitled “Novel Cas13b Orthologues CRISPR Enzymes and System”. In particular embodiments, the Cas13b enzyme is derived from Bergeyella zoohelcum. In certain other example embodiments, the effector protein is, or comprises an amino acid sequence having at least 80% sequence homology to any of the sequences listed in Tables 1A or 1B of International Patent Publication No. WO2018/1703333, specifically incorporated herein by reference. In certain embodiments, the Cas 13b effector protein is, or comprises an amino acid sequence having at least 80% sequence homology to any of the polypeptides in U.S. Provisional Applications 62/484,791, 62/561,662, 62/568,129 or International Patent Publication WO2018/191388, all entitled “Novel Type VI CRISPR Orthologs and Systems,” incorporated herein by reference. In certain embodiments, the Cas13b effector protein is, or comprises an amin acid sequence having at least 80% sequence homology to a polypeptide as set forth in FIG. 1 of International Patent Publication WO2018/191388, specifically incorporated herein by reference. In an aspect, the Cas13b protein is selected from the group consisting of Porphyromonas gulae Cas13b (accession number WP 039434803), Prevotella sp. P5-125 Cas 13b (accession number WP 044065294), Porphyromonas gingivalis Cas 13b (accession number WP 053444417), Porphyromonas sp. COT-052 OH4946 Cas 13b (accession number WP 039428968), Bacteroides pyogenes Cas 13b (accession number WP 034542281), Riemerella anatipestifer Cas13b (accession number WP 004919755).

[0100] In certain example embodiments, the RNA-targeting effector protein is a Cas13c effector protein as disclosed in U.S. Provisional Patent Application No. 62/525,165 filed Jun. 26, 2017, and International Patent Publication No. WO2018/035250 filed Aug. 16, 2017. In certain example embodiments, the Cas13c protein may be from an organism of a genus such as Fusobacterium or Anaerosalibacter. Example wildtype orthologue sequences of Cas13c are: EH019081, WP 094899336, WP 040490876, WP 047396607, WP 035935671, WP 035906563, WP 042678931, WP 062627846, WP 005959231, WP 027128616, WP 062624740, WP 096402050.

[0101] In certain example embodiments, the Cas13 protein may be selected from any of the following: Cas13a: Leptotrichia shahii, Leptotrichia wadei (Lw2), Listeria seeligeri, Lachnospiraceae bacterium MA2020, Lachnospiraceae bacterium NK4A179, [Clostridium] aminophilum DSM 10710, Carnobacterium gallinarum DSM 4847, Carnobacterium gallinarum DSM 4847, Paludibacter propionicigenes WB4, Listeria weihenstephanensis FSL R9-0317, Listeriaceae bacterium FSL M6-0635, Leptotrichia wadei F0279, Rhodobacter capsulatus SB 1003, Rhodobacter capsulatus R121, Rhodobacter capsulatus DE442, Leptotrichia buccalis C-1013-b, Herbinix hemicellulosilytica, [Eubacterium] rectale, Eubacteriaceae bacterium CHKCI004, Blautia sp. Marseille-P2398, Leptotrichia sp. oral taxon 879 str. F0557; Cas 13b: Bergeyella zoohelcum, Prevotella intermedia, Prevotella buccae, Alistipes sp. ZOR0009, Prevotella sp. MA2016, Riemerella anatipestifer, Prevotella aurantiaca, Prevotella saccharolytica, Prevotella intermedia, Capnocytophaga canimorsus, Porphyromonas gulae, Prevotella sp. P5-125, Flavobacterium branchiophilum, Porphyromonas gingivalis, Prevotella intermedia; Cas13c: Fusobacterium necrophorum subsp. funduliforme ATCC 51357 contig00003, Fusobacterium necrophorum DJ-2 contig0065, whole genome shotgun sequence, Fusobacterium necrophorum BFTR-1 contig0068, Fusobacterium necrophorum subsp. funduliforme 1_1_36S cont1.14, Fusobacterium perfoetens ATCC 29250 T364DRAFT_scaffold00009.9_C, Fusobacterium ulcerans ATCC 49185 cont2.38, Anaerosalibacter sp. ND1 genome assembly Anaerosalibacter massiliensis ND1.Cas13s non-specific RNase activity can be leveraged to cleave reporters upon target recognition, allowing for the design of sensitive and specific diagnostics using Cas13, including single nucleotide variants, detection based on rRNA sequences, screening for drug resistance, monitoring microbe outbreaks, genetic perturbations, and screening of environmental samples, as described, for example, in PCT/US18/054472 filed Oct. 22, 2018 at [0183]-[0327], incorporated herein by reference. Reference is made to WO 2017/219027, WO2018/107129, US20180298445, US 2018-0274017, US 2018-0305773, WO 2018/170340, U.S. application Ser. No. 15/922,837, filed Mar. 15, 2018 entitled “Devices for CRISPR Effector System Based Diagnostics”, PCT/US18/50091, filed Sep. 7, 2018 “Multi-Effector CRISPR Based Diagnostic Systems”, PCT/US18/66940 filed Dec. 20, 2018 entitled “CRISPR Effector System Based Multiplex Diagnostics”, PCT/US18/054472 filed Oct. 4, 2018 entitled “CRISPR Effector System Based Diagnostic”, U.S. Provisional 62/740,728 filed Oct. 3, 2018 entitled “CRISPR Effector System Based Diagnostics for Hemorrhagic Fever Detection”, U.S. Provisional 62/690,278 filed Jun. 26, 2018 and U.S. Provisional 62/767,059 filed Nov. 14, 2018 both entitled “CRISPR Double Nickase Based Amplification, Compositions, Systems and Methods”, U.S. Provisional 62/690,160 filed Jun. 26, 2018 and 62,767,077 filed Nov. 14, 2018, both entitled “CRISPR/CAS and Transposase Based Amplification Compositions, Systems, And Methods”, U.S. Provisional 62/690,257 filed Jun. 26, 2018 and 62/767,052 filed Nov. 14, 2018 both entitled “CRISPR Effector System Based Amplification Methods, Systems, And Diagnostics”, U.S. Provisional 62/767,076 filed Nov. 14, 2018 entitled “Multiplexing Highly Evolving Viral Variants With SHERLOCK” and 62/767,070 filed Nov. 14, 2018 entitled “Droplet SHERLOCK.” Reference is further made to WO2017/127807, WO2017/184786, WO 2017/184768, WO 2017/189308, WO 2018/035388, WO 2018/170333, WO 2018/191388, WO 2018/213708, WO 2019/005866, PCT/US18/67328 filed Dec. 21, 2018 entitled “Novel CRISPR Enzymes and Systems”, PCT/US18/67225 filed Dec. 21, 2018 entitled “Novel CRISPR Enzymes and Systems”and PCT/US18/67307 filed Dec. 21, 2018 entitled “Novel CRISPR Enzymes and Systems”, U.S. 62/712,809 filed Jul. 31, 2018 entitled “Novel CRISPR Enzymes and Systems”, U.S. 62/744,080 filed Oct. 10, 2018 entitled “Novel Cas12b Enzymes and Systems” and U.S. 62/751,196 filed Oct. 26 2018 entitled “Novel Cas12b Enzymes and Systems”, U.S. Pat. No. 715,640 filed August 7, 2-18 entitled “Novel CRISPR Enzymes and Systems”, WO 2016/205711, U.S. Pat. No. 9,790,490, WO 2016/205749, WO 2016/205764, WO 2017/070605, WO 2017/106657, and WO 2016/149661, WO2018/035387, WO2018/194963, Cox DBT, et al., RNA editing with CRISPR-Cas13, Science. 2017 Nov. 24; 358(6366):1019-1027; Gootenberg J S, et al., Multiplexed and portable nucleic acid detection platform with Cas13, Cas12a, and Csm6., Science. 2018 Apr. 27; 360(6387):439-444; Gootenberg J S, et al., Nucleic acid detection with CRISPR-Cas13a/C2c2., Science. 2017 Apr. 28; 356(6336):438-442; Abudayyeh O O, et al., RNA targeting with CRISPR-Cas13, Nature. 2017 Oct. 12; 550(7675):280-284; Smargon A A, et al., Cas13b Is a Type VI-B CRISPR-Associated RNA-Guided RNase Differentially Regulated by Accessory Proteins Csx27 and Csx28. Mol Cell. 2017 Feb. 16; 65(4):618-630.e7; Abudayyeh O O, et al., C2c2 is a single-component programmable RNA-guided RNA-targeting CRISPR effector, Science. 2016 Aug 5; 353(6299):aaf5573; Yang L, et al., Engineering and optimising deaminase fusions for genome editing. Nat Commun. 2016 Nov. 2; 7:13330, Myrvhold et al., Field deployable viral diagnostics using CRISPR-Cas13, Science 2018 360, 444-448, Shmakov et al. “Diversity and evolution of class 2 CRISPR-Cas systems,” Nat Rev Microbiol. 2017 15(3):169-182, each of which is incorporated herein by reference in its entirety.

### DNA-Targeting Effector Proteins

[0102] In certain example embodiments, the assays may comprise a DNA-targeting effector protein. In certain example embodiments, the assays may comprise multiple DNA-targeting effectors or one or more orthologs in combination with one or more RNA-targeting effectors. In certain example embodiments, the DNA targeting are Type V Cas proteins, such as Cas12 proteins. In certain other example embodiments, the Cas12 proteins are Cas12a, Cas12b, Cas12c, or a combination thereof.

[0103] Cas 12a Orthologs

[0104] The present invention encompasses the use of a Cpf1 effector protein, derived from a Cpf1 locus denoted as subtype V-A. Herein such effector proteins are also referred to as “Cpf1p”, e.g., a Cpf1 protein (and such effector protein or Cpf1 protein or protein derived from a Cpf1 locus is also called “CRISPR enzyme”). Presently, the subtype V-A loci encompasses cas1, cas2, a distinct gene denoted cpfl and a CRISPR array. Cpf1 (CRISPR-associated protein Cpf1, subtype PREFRAN) is a large protein (about 1300 amino acids) that contains a RuvC-like nuclease domain homologous to the corresponding domain of Cas9 along with a counterpart to the characteristic arginine-rich cluster of Cas9. However, Cpf1 lacks the HNH nuclease domain that is present in all Cas9 proteins, and the RuvC-like domain is contiguous in the Cpf1 sequence, in contrast to Cas9 where it contains long inserts including the HNH domain. Accordingly, in particular embodiments, the CRISPR-Cas enzyme comprises only a RuvC-like nuclease domain.

[0105] The programmability, specificity, and collateral activity of the RNA-guided Cpf1 also make it an ideal switchable nuclease for non-specific cleavage of nucleic acids. In one embodiment, a Cpf1 system is engineered to provide and take advantage of collateral non-specific cleavage of RNA. In another embodiment, a Cpf1 system is engineered to provide and take advantage of collateral non-specific cleavage of ssDNA. Accordingly, engineered Cpf1 systems provide platforms for nucleic acid detection and transcriptome manipulation. Cpf1 is developed for use as a mammalian transcript knockdown and binding tool. Cpf1 is capable of robust collateral cleavage of RNA and ssDNA when activated by sequence-specific targeted DNA binding.

[0106] Homologs and orthologs may be identified by homology modelling (see, e.g., Greer, Science vol. 228 (1985) 1055, and Blundell et al. Eur J Biochem vol 172 (1988), 513) or “structural BLAST” (Dey F, Cliff Zhang Q, Petrey D, Honig B. Toward a “structural BLAST”: using structural relationships to infer function. Protein Sci. 2013 April; 22(4):359-66. doi: 10.1002/pro.2225.). See also Shmakov et al. (2015) for application in the field of CRISPR-Cas loci. Homologous proteins may but need not be structurally related, or are only partially structurally related. The Cpf1 gene is found in several diverse bacterial genomes, typically in the same locus with cas1, cas2, and cas4 genes and a CRISPR cassette (for example, FNFX1_1431-FNFX1_1428 of Francisella cf. novicida Fx1). In particular embodiments, the effector protein is a Cpf1 effector protein from an organism from a genus comprising Streptococcus, Campylobacter, Nitratifractor, Staphylococcus, Parvibaculum, Roseburia, Neisseria, Gluconacetobacter, Azospirillum, Sphaerochaeta, Lactobacillus, Eubacterium, Corynebacter, Carnobacterium, Rhodobacter, Listeria, Paludibacter, Clostridium, Lachnospiraceae, Clostridiaridium, Leptotrichia, Francisella, Legionella, Alicyclobacillus, Methanomethyophilus, Porphyromonas, Prevotella, Bacteroidetes, Helcococcus, Letospira, Desulfovibrio, Desulfonatronum, Opitutaceae, Tuberibacillus, Bacillus, Brevibacilus, Methylobacterium or Acidaminococcus.

[0107] In further particular embodiments, the Cpf1 effector protein is from an organism selected from S. mutans, S. agalactiae, S. equisimilis, S. sanguinis, S. pneumonia; C. jejuni, C. coli; N. salsuginis, N. tergarcus; S. auricularis, S. carnosus; N. meningitides, N. gonorrhoeae; L. monocytogenes, L. ivanovii; C. botulinum, C. difficile, C. tetani, C. sordellii.

[0108] The effector protein may comprise a chimeric effector protein comprising a first fragment from a first effector protein (e.g., a Cpf1) ortholog and a second fragment from a second effector (e.g., a Cpf1) protein ortholog, and wherein the first and second effector protein orthologs are different. At least one of the first and second effector protein (e.g., a Cpf1) orthologs may comprise an effector protein (e.g., a Cpf1) from an organism comprising Streptococcus, Campylobacter, Nitratifractor, Staphylococcus, Parvibaculum, Roseburia, Neisseria, Gluconacetobacter, Azospirillum, Sphaerochaeta, Lactobacillus, Eubacterium, Corynebacter, Carnobacterium, Rhodobacter, Listeria, Paludibacter, Clostridium, Lachnospiraceae, Clostridiaridium, Leptotrichia, Francisella, Legionella, Alicyclobacillus, Methanomethyophilus, Porphyromonas, Prevotella, Bacteroidetes, Helcococcus, Letospira, Desulfovibrio, Desulfonatronum, Opitutaceae, Tuberibacillus, Bacillus, Brevibacilus, Methylobacterium or Acidaminococcus; e.g., a chimeric effector protein comprising a first fragment and a second fragment wherein each of the first and second fragments is selected from a Cpf1 of an organism comprising Streptococcus, Campylobacter, Nitratifractor, Staphylococcus, Parvibaculum, Roseburia, Neisseria, Gluconacetobacter, Azospirillum, Sphaerochaeta, Lactobacillus, Eubacterium, Corynebacter, Carnobacterium, Rhodobacter, Listeria, Paludibacter, Clostridium, Lachnospiraceae, Clostridiaridium, Leptotrichia, Francisella, Legionella, Alicyclobacillus, Methanomethyophilus, Porphyromonas, Prevotella, Bacteroidetes, Helcococcus, Letospira, Desulfovibrio, Desulfonatronum, Opitutaceae, Tuberibacillus, Bacillus, Brevibacilus, Methylobacterium or Acidaminococcus wherein the first and second fragments are not from the same bacteria; for instance a chimeric effector protein comprising a first fragment and a second fragment wherein each of the first and second fragments is selected from a Cpf1 of S. mutans, S. agalactiae, S. equisimilis, S. sanguinis, S. pneumonia; C. jejuni, C. coli; N. salsuginis, N. tergarcus; S. auricularis, S. carnosus; N. meningitides, N. gonorrhoeae; L. monocytogenes, L. ivanovii; C. botulinum, C. difficile, C. tetani, C. sordellii; Francisella tularensis 1, Prevotella albensis, Lachnospiraceae bacterium MC2017 1, Butyrivibrio proteoclasticus, Peregrinibacteria bacterium GW2011_GWA2_33_10, Parcubacteria bacterium GW2011_GWC2_44_17, Smithella sp. SCADC, Acidaminococcus sp. BV3L6, Lachnospiraceae bacterium MA2020, Candidatus Methanoplasma termitum, Eubacterium eligens, Moraxella bovoculi 237, Leptospira inadai, Lachnospiraceae bacterium ND2006, Porphyromonas crevioricanis 3, Prevotella disiens and Porphyromonas macacae, wherein the first and second fragments are not from the same bacteria. In a more preferred embodiment, the Cpf1p is derived from a bacterial species selected from Francisella tularensis 1, Prevotella albensis, Lachnospiraceae bacterium MC2017 1, Butyrivibrio proteoclasticus, Peregrinibacteria bacterium GW2011_GWA2_33_10, Parcubacteria bacterium GW2011_GWC2_44_17, Smithella sp. SCADC, Acidaminococcus sp. BV3L6, Lachnospiraceae bacterium MA2020, Candidatus Methanoplasma termitum, Eubacterium eligens, Moraxella bovoculi 237, Leptospira inadai, Lachnospiraceae bacterium ND2006, Porphyromonas crevioricanis 3, Prevotella disiens and Porphyromonas macacae. In certain embodiments, the Cpf1p is derived from a bacterial species selected from Acidaminococcus sp. BV3L6, Lachnospiraceae bacterium MA2020. In certain embodiments, the effector protein is derived from a subspecies of Francisella tularensis 1, including but not limited to Francisella tularensis subsp. Novicida.

[0109] In some embodiments, the Cpf1p is derived from an organism from the genus of Eubacterium. In some embodiments, the CRISPR effector protein is a Cpf1 protein derived from an organism from the bacterial species of Eubacterium rectale. In some embodiments, the amino acid sequence of the Cpf1 effector protein corresponds to NCBI Reference Sequence WP_055225123.1, NCBI Reference Sequence WP_055237260.1, NCBI Reference Sequence WP_055272206.1, or GenBank ID OLA16049.1. In some embodiments, the Cpf1 effector protein has a sequence homology or sequence identity of at least 60%, more particularly at least 70, such as at least 80%, more preferably at least 85%, even more preferably at least 90%, such as for instance at least 95%, with NCBI Reference Sequence WP_055225123.1, NCBI Reference Sequence WP_055237260.1, NCBI Reference Sequence WP_055272206.1, or GenBank ID OLA16049.1. The skilled person will understand that this includes truncated forms of the Cpf1 protein whereby the sequence identity is determined over the length of the truncated form. In some embodiments, the Cpf1 effector recognizes the PAM sequence of TTTN or CTTN.

[0110] In particular embodiments, the homologue or orthologue of Cpf1 as referred to herein has a sequence homology or identity of at least 80%, more preferably at least 85%, even more preferably at least 90%, such as for instance at least 95% with Cpf1. In further embodiments, the homologue or orthologue of Cpf1 as referred to herein has a sequence identity of at least 80%, more preferably at least 85%, even more preferably at least 90%, such as for instance at least 95% with the wild type Cpf1. Where the Cpf1 has one or more mutations (mutated), the homologue or orthologue of said Cpf1 as referred to herein has a sequence identity of at least 80%, more preferably at least 85%, even more preferably at least 90%, such as for instance at least 95% with the mutated Cpf1.

[0111] In an embodiment, the Cpf1 protein may be an ortholog of an organism of a genus which includes, but is not limited to Acidaminococcus sp, Lachnospiraceae bacterium or Moraxella bovoculi; in particular embodiments, the type V Cas protein may be an ortholog of an organism of a species which includes, but is not limited to Acidaminococcus sp. BV3L6; Lachnospiraceae bacterium ND2006 (LbCpf1) or Moraxella bovoculi 237.In particular embodiments, the homologue or orthologue of Cpf1 as referred to herein has a sequence homology or identity of at least 80%, more preferably at least 85%, even more preferably at least 90%, such as for instance at least 95% with one or more of the Cpf1 sequences disclosed herein. In further embodiments, the homologue or orthologue of Cpf as referred to herein has a sequence identity of at least 80%, more preferably at least 85%, even more preferably at least 90%, such as for instance at least 95% with the wild type FnCpf1, AsCpf1 or LbCpf1. The skilled person will understand that this includes truncated forms of the Cpf1 protein whereby the sequence identity is determined over the length of the truncated form. In certain of the following, Cpf1 amino acids are followed by nuclear localization signals (NLS) (italics), a glycine-serine (GS) linker, and 3× HA tag. Further Cpf1 orthologs include NCBI WP_055225123.1, NCBI WP_055237260.1, NCBI WP_055272206.1, and GenBank OLA16049.1.

[0112] Cas 12b Orthologs

[0113] The present invention encompasses the use of a Cas 12b (C2c1) effector proteins, derived from a C2c1 locus denoted as subtype V-B. Herein such effector proteins are also referred to as “C2c1p”, e.g., a C2c1 protein (and such effector protein or C2c1 protein or protein derived from a C2c1 locus is also called “CRISPR enzyme”). Presently, the subtype V-B loci encompasses cas1-Cas4 fusion, cas2, a distinct gene denoted C2c1 and a CRISPR array. C2c1 (CRISPR-associated protein C2c1) is a large protein (about 1100-1300 amino acids) that contains a RuvC-like nuclease domain homologous to the corresponding domain of Cas9 along with a counterpart to the characteristic arginine-rich cluster of Cas9. However, C2c1 lacks the HNH nuclease domain that is present in all Cas9 proteins, and the RuvC-like domain is contiguous in the C2c1 sequence, in contrast to Cas9 where it contains long inserts including the HNH domain. Accordingly, in particular embodiments, the CRISPR-Cas enzyme comprises only a RuvC-like nuclease domain.

[0114] The programmability, specificity, and collateral activity of the RNA-guided C2c1 also make it an ideal switchable nuclease for non-specific cleavage of nucleic acids. In one embodiment, a C2c1 system is engineered to provide and take advantage of collateral non-specific cleavage of RNA. In another embodiment, a C2c1 system is engineered to provide and take advantage of collateral non-specific cleavage of ssDNA. Accordingly, engineered C2c1 systems provide platforms for nucleic acid detection and transcriptome manipulation, and inducing cell death. C2c1 is developed for use as a mammalian transcript knockdown and binding tool. C2c1 is capable of robust collateral cleavage of RNA and ssDNA when activated by sequence-specific targeted DNA binding.

[0115] In certain embodiments, C2c1 is provided or expressed in an in vitro system or in a cell, transiently or stably, and targeted or triggered to non-specifically cleave cellular nucleic acids. In one embodiment, C2c1 is engineered to knock down ssDNA, for example viral ssDNA. In another embodiment, C2c1 is engineered to knock down RNA. The system can be devised such that the knockdown is dependent on a target DNA present in the cell or in vitro system, or triggered by the addition of a target nucleic acid to the system or cell.

[0116] C2c1 (also known as Cas12b) proteins are RNA guided nucleases. In certain embodiments, the Cas protein may comprise at least 80% sequence identity to a polypeptide as described in International Patent Publication WO 2016/205749 at FIG. 17-21, FIG. 41A-41M, 44A-44E, incorporated herein by reference. Its cleavage relies on a tracr RNA to recruit a guide RNA comprising a guide sequence and a direct repeat, where the guide sequence hybridizes with the target nucleotide sequence to form a DNA/RNA heteroduplex. Based on current studies, C2c1 nuclease activity also requires relies on recognition of PAM sequence. C2c1 PAM sequences are T-rich sequences. In some embodiments, the PAM sequence is 5′ TTN 3′ or 5′ ATTN 3′, wherein N is any nucleotide. In a particular embodiment, the PAM sequence is 5′ TTC 3′. In a particular embodiment, the PAM is in the sequence of Plasmodium falciparum.

[0117] In particular embodiments, the effector protein is a C2c1 effector protein from an organism from a genus comprising Alicyclobacillus, Desulfovibrio, Desulfonatronum, Opitutaceae, Tuberibacillus, Bacillus, Brevibacillus, Candidatus, Desulfatirhabdium, Citrobacter, Elusimicrobia, Methylobacterium, Omnitrophica, Phycisphaerae, Planctomycetes, Spirochaetes, and Verrucomicrobiaceae.

[0118] In further particular embodiments, the C2c1 effector protein is from a species selected from Alicyclobacillus acidoterrestris (e.g., ATCC 49025), Alicyclobacillus contaminans (e.g., DSM 17975), Alicyclobacillus macrosporangiidus (e.g. DSM 17980), Bacillus hisashii strain C4, Candidatus Lindowbacteria bacterium RIFCSPLOWO2, Desulfovibrio inopinatus (e.g., DSM 10711), Desulfonatronum thiodismutans (e.g., strain MLF-1), Elusimicrobia bacterium RIFOXYA12, Omnitrophica WOR_2 bacterium RIFCSPHIGHO2, Opitutaceae bacterium TAVS, Phycisphaerae bacterium ST-NAGAB-D1, Planctomycetes bacterium RBG 13 46 10, Spirochaetes bacterium GWB1_27_13, Verrucomicrobiaceae bacterium UBA2429, Tuberibacillus calidus (e.g., DSM 17572), Bacillus thermoamylovorans (e.g., strain B4166), Brevibacillus sp. CF112, Bacillus sp. NSP2.1, Desulfatirhabdium butyrativorans (e.g., DSM 18734), Alicyclobacillus herbarius (e.g., DSM 13609), Citrobacter freundii (e.g., ATCC 8090), Brevibacillus agri (e.g., BAB-2500), Methylobacterium nodulans (e.g., ORS 2060).

[0119] The effector protein may comprise a chimeric effector protein comprising a first fragment from a first effector protein (e.g., a C2c1) ortholog and a second fragment from a second effector (e.g., a C2c1) protein ortholog, and wherein the first and second effector protein orthologs are different. At least one of the first and second effector protein (e.g., a C2c1) orthologs may comprise an effector protein (e.g., a C2c1) from an organism comprising Alicyclobacillus, Desulfovibrio, Desulfonatronum, Opitutaceae, Tuberibacillus, Bacillus, Brevibacillus, Candidatus, Desulfatirhabdium, Elusimicrobia, Citrobacter, Methylobacterium, Omnitrophicai, Phycisphaerae, Planctomycetes, Spirochaetes, and Verrucomicrobiaceae; e.g., a chimeric effector protein comprising a first fragment and a second fragment wherein each of the first and second fragments is selected from a C2c1 of an organism comprising Alicyclobacillus, Desulfovibrio, Desulfonatronum, Opitutaceae, Tuberibacillus, Bacillus, Brevibacillus, Candidatus, Desulfatirhabdium, Elusimicrobia, Citrobacter, Methylobacterium, Omnitrophicai, Phycisphaerae, Planctomycetes, Spirochaetes, and Verrucomicrobiaceae wherein the first and second fragments are not from the same bacteria; for instance a chimeric effector protein comprising a first fragment and a second fragment wherein each of the first and second fragments is selected from a C2c1 of Alicyclobacillus acidoterrestris (e.g., ATCC 49025), Alicyclobacillus contaminans (e.g., DSM 17975), Alicyclobacillus macrosporangiidus (e.g. DSM 17980), Bacillus hisashii strain C4, Candidatus Lindowbacteria bacterium RIFCSPLOWO2, Desulfovibrio inopinatus (e.g., DSM 10711), Desulfonatronum thiodismutans (e.g., strain MLF-1), Elusimicrobia bacterium RIFOXYA12, Omnitrophica WOR_2 bacterium RIFCSPHIGHO2, Opitutaceae bacterium TAV5, Phycisphaerae bacterium ST-NAGAB-D1, Planctomycetes bacterium RBG_13-46_10, Spirochaetes bacterium GWB1_27_13, Verrucomicrobiaceae bacterium UBA2429, Tuberibacillus calidus (e.g., DSM 17572), Bacillus thermoamylovorans (e.g., strain B4166), Brevibacillus sp. CF112, Bacillus sp. NSP2.1, Desulfatirhabdium butyrativorans (e.g., DSM 18734), Alicyclobacillus herbarius (e.g., DSM 13609), Citrobacter freundii (e.g., ATCC 8090), Brevibacillus agri (e.g., BAB-2500), Methylobacterium nodulans (e.g., ORS 2060), wherein the first and second fragments are not from the same bacteria.

[0120] In a more preferred embodiment, the C2c1p is derived from a bacterial species selected from Alicyclobacillus acidoterrestris (e.g., ATCC 49025), Alicyclobacillus contaminans (e.g., DSM 17975), Alicyclobacillus macrosporangiidus (e.g. DSM 17980), Bacillus hisashii strain C4, Candidatus Lindowbacteria bacterium RIFCSPLOWO2, Desulfovibrio inopinatus (e.g., DSM 10711), Desulfonatronum thiodismutans (e.g., strain MLF-1), Elusimicrobia bacterium RIFOXYA12, Omnitrophica WOR_2 bacterium RIFCSPHIGHO2, Opitutaceae bacterium TAV5, Phycisphaerae bacterium ST-NAGAB-D1, Planctomycetes bacterium RBG_13_46_10, Spirochaetes bacterium GWB1_27_13, Verrucomicrobiaceae bacterium UBA2429, Tuberibacillus calidus (e.g., DSM 17572), Bacillus thermoamylovorans (e.g., strain B4166), Brevibacillus sp. CF112, Bacillus sp. NSP2.1, Desulfatirhabdium butyrativorans (e.g., DSM 18734), Alicyclobacillus herbarius (e.g., DSM 13609), Citrobacter freundii (e.g., ATCC 8090), Brevibacillus agri (e.g., BAB-2500), Methylobacterium nodulans (e.g., ORS 2060). In certain embodiments, the C2c1p is derived from a bacterial species selected from Alicyclobacillus acidoterrestris (e.g., ATCC 49025), Alicyclobacillus contaminans (e.g., DSM 17975).

[0121] In particular embodiments, the homologue or orthologue of C2c1 as referred to herein has a sequence homology or identity of at least 80%, more preferably at least 85%, even more preferably at least 90%, such as for instance at least 95% with C2c1. In further embodiments, the homologue or orthologue of C2c1 as referred to herein has a sequence identity of at least 80%, more preferably at least 85%, even more preferably at least 90%, such as for instance at least 95% with the wild type C2c1. Where the C2c1 has one or more mutations (mutated), the homologue or orthologue of said C2c1 as referred to herein has a sequence identity of at least 80%, more preferably at least 85%, even more preferably at least 90%, such as for instance at least 95% with the mutated C2c1.

[0122] In an embodiment, the C2c1 protein may be an ortholog of an organism of a genus which includes, but is not limited to Alicyclobacillus, Desulfovibrio, Desulfonatronum, Opitutaceae, Tuberibacillus, Bacillus, Brevibacillus, Candidatus, Desulfatirhabdium, Elusimicrobia, Citrobacter, Methylobacterium, Omnitrophicai, Phycisphaerae, Planctomycetes, Spirochaetes, and Verrucomicrobiaceae; in particular embodiments, the type V Cas protein may be an ortholog of an organism of a species which includes, but is not limited to Alicyclobacillus acidoterrestris (e.g., ATCC 49025), Alicyclobacillus contaminans (e.g., DSM 17975), Alicyclobacillus macrosporangiidus (e.g. DSM 17980), Bacillus hisashii strain C4, Candidatus Lindowbacteria bacterium RIFCSPLOWO2, Desulfovibrio inopinatus (e.g., DSM 10711), Desulfonatronum thiodismutans (e.g., strain MLF-1), Elusimicrobia bacterium RIFOXYA12, Omnitrophica WOR_2 bacterium RIFCSPHIGHO2, Opitutaceae bacterium TAVS, Phycisphaerae bacterium ST-NAGAB-D 1, Planctomycetes bacterium RBG_13_46_10, Spirochaetes bacterium GWB1_27_13, Verrucomicrobiaceae bacterium UBA2429, Tuberibacillus calidus (e.g., DSM 17572), Bacillus thermoamylovorans (e.g., strain B4166), Brevibacillus sp. CF112, Bacillus sp. NSP2.1, Desulfatirhabdium butyrativorans (e.g., DSM 18734), Alicyclobacillus herbarius (e.g., DSM 13609), Citrobacter freundii (e.g., ATCC 8090), Brevibacillus agri (e.g., BAB-2500), Methylobacterium nodulans (e.g., ORS 2060). In particular embodiments, the homologue or orthologue of C2c1 as referred to herein has a sequence homology or identity of at least 80%, more preferably at least 85%, even more preferably at least 90%, such as for instance at least 95% with one or more of the C2c1 sequences disclosed herein. In further embodiments, the homologue or orthologue of C2c1 as referred to herein has a sequence identity of at least 80%, more preferably at least 85%, even more preferably at least 90%, such as for instance at least 95% with the wild type AacC2c1 or BthC2c1.

[0123] In particular embodiments, the C2c1 protein of the invention has a sequence homology or identity of at least 60%, more particularly at least 70, such as at least 80%, more preferably at least 85%, even more preferably at least 90%, such as for instance at least 95% with AacC2c1 or BthC2c1. In further embodiments, the C2c1 protein as referred to herein has a sequence identity of at least 60%, such as at least 70%, more particularly at least 80%, more preferably at least 85%, even more preferably at least 90%, such as for instance at least 95% with the wild type AacC2c1. In particular embodiments, the C2c1 protein of the present invention has less than 60% sequence identity with AacC2c1. The skilled person will understand that this includes truncated forms of the C2c1 protein whereby the sequence identity is determined over the length of the truncated form.

[0124] In certain methods according to the present invention, the CRISPR-Cas protein is preferably mutated with respect to a corresponding wild-type enzyme such that the mutated CRISPR-Cas protein lacks the ability to cleave one or both DNA strands of a target locus containing a target sequence. In particular embodiments, one or more catalytic domains of the C2c1 protein are mutated to produce a mutated Cas protein which cleaves only one DNA strand of a target sequence.

[0125] In particular embodiments, the CRISPR-Cas protein may be mutated with respect to a corresponding wild-type enzyme such that the mutated CRISPR-Cas protein lacks substantially all DNA cleavage activity. In some embodiments, a CRISPR-Cas protein may be considered to substantially lack all DNA and/or RNA cleavage activity when the cleavage activity of the mutated enzyme is about no more than 25%, 10%, 5%, 1%, 0.1%, 0.01%, or less of the nucleic acid cleavage activity of the non-mutated form of the enzyme; an example can be when the nucleic acid cleavage activity of the mutated form is nil or negligible as compared with the non-mutated form.

[0126] In certain embodiments of the methods provided herein the CRISPR-Cas protein is a mutated CRISPR-Cas protein which cleaves only one DNA strand, i.e. a nickase. More particularly, in the context of the present invention, the nickase ensures cleavage within the non-target sequence, i.e. the sequence which is on the opposite DNA strand of the target sequence and which is 3′ of the PAM sequence. By means of further guidance, and without limitation, an arginine-to-alanine substitution (R911A) in the Nuc domain of C2c1 from Alicyclobacillus acidoterrestris converts C2c1 from a nuclease that cleaves both strands to a nickase (cleaves a single strand). It will be understood by the skilled person that where the enzyme is not AacC2c1, a mutation may be made at a residue in a corresponding position.

### Cas 12c Orthologs

[0127] In certain embodiments, the effector protein, particularly a Type V loci effector protein, more particularly a Type V-C loci effector protein, a Cas12c protein, even more particularly a C2c3p, may originate, may be isolated or may be derived from a bacterial metagenome selected from the group consisting of the bacterial metagenomes listed in the Table in FIG. 43A-43B of PCT/US2016/038238, specifically incorporated by reference, which presents analysis of the Type-V-C Cas12c loci.

[0128] In certain embodiments, the effector protein, particularly a Type V loci effector protein, more particularly a Type V-C loci effector protein, even more particularly a C2c3p, may comprise, consist essentially of or consist of an amino acid sequence selected from the group consisting of amino acid sequences shown in the multiple sequence alignment in FIG. 131 of PCT/US2016/038238, specifically incorporated by reference.

[0129] In certain embodiments, a Type V-C locus as intended herein may encode Cas1 and the C2c3p effector protein. See FIG. 14 of PCT/US2016/038238, specifically incorporated by reference, depicting the genomic architecture of the Cas12c CRISPR-Cas loci. In certain embodiments, a Cas1 protein encoded by a Type V-C locus as intended herein may cluster with Type I-B system. See FIG. 10A and 10B and FIG. 10C-V of PCT/US2016/038238, specifically incorporated by reference, illustrating a Cas1 tree including Cas1 encoded by representative Type V-C loci.

[0130] In certain embodiments, the effector protein, particularly a Type V loci effector protein, more particularly a Type V-C loci effector protein, even more particularly a C2c3p, such as a native C2c3p, may be about 1100 to about 1500 amino acids long, e.g., about 1100 to about 1200 amino acids long, or about 1200 to about 1300 amino acids long, or about 1300 to about 1400 amino acids long, or about 1400 to about 1500 amino acids long, e.g., about 1100, about 1200, about 1300, about 1400 or about 1500 amino acids long, or at least about 1100, at least about 1200, at least about 1300, at least about 1400 or at least about 1500 amino acids long.

[0131] In certain embodiments, the effector protein, particularly a Type V loci effector protein, more particularly a Type V-C loci effector protein, even more particularly a C2c3p, and preferably the C-terminal portion of said effector protein, comprises the three catalytic motifs of the RuvC-like nuclease (i.e., RuvCI, RuvCII and RuvCIII). In certain embodiments, said effector protein, and preferably the C-terminal portion of said effector protein, may further comprise a region corresponding to the bridge helix (also known as arginine-rich cluster) that in Cas9 protein is involved in crRNA-binding. In certain embodiments, said effector protein, and preferably the C-terminal portion of said effector protein, may further comprise a Zn finger region. Preferably, the Zn-binding cysteine residue(s) may be conserved in C2c3p. In certain embodiments, said effector protein, and preferably the C-terminal portion of said effector protein, may comprise the three catalytic motifs of the RuvC-like nuclease (i.e., RuvCI, RuvCII and RuvCIII), the region corresponding to the bridge helix, and the Zn finger region, preferably in the following order, from N to C terminus: RuvCI-bridge helix-RuvCII-Zinc finger-RuvCIII. See FIG. 13A and 13C of PCT/US2016/038238, specifically incorporated by reference, for illustration of representative Type V-C effector proteins domain architecture.

[0132] In certain embodiments, Type V-C loci as intended herein may comprise CRISPR repeats between 20 and 30 bp long, more typically between 22 and 27 bp long, yet more typically 25 bp long, e.g., 20, 21, 22, 23, 24, 25, 26, 27, 28, 29, or 30 bp long.

[0133] Orthologous proteins may but need not be structurally related, or are only partially structurally related. In particular embodiments, the homologue or orthologue of a Type V protein such as Cas12c as referred to herein has a sequence homology or identity of at least 80%, more preferably at least 85%, even more preferably at least 90%, such as for instance at least 95% with a Cas12c. In further embodiments, the homologue or orthologue of a Type V Cas12c as referred to herein has a sequence identity of at least 80%, more preferably at least 85%, even more preferably at least 90%, such as for instance at least 95% with the wild type Cas12c.

[0134] In an embodiment, the Type V RNA-targeting Cas protein may be a Cas12c ortholog of an organism of a genus which includes but is not limited to Corynebacter, Sutterella, Legionella, Treponema, Filifactor, Eubacterium, Streptococcus, Lactobacillus, Mycoplasma, Bacteroides, Flaviivola, Flavobacterium, Sphaerochaeta, Azospirillum, Gluconacetobacter, Neisseria, Roseburia, Parvibaculum, Staphylococcus, Nitratifractor, Mycoplasma and Campylobacter.

[0135] In an embodiment, the Cas12c or an ortholog or homolog thereof, may comprise one or more mutations (and hence nucleic acid molecule(s) coding for same may have mutation(s). The mutations may be artificially introduced mutations and may include but are not limited to one or more mutations in a catalytic domain. Examples of catalytic domains with reference to a Cas enzyme may include but are not limited to RuvC I, RuvC II, RuvC III, HNH domains, and HEPN domains, as described herein. In an embodiment, the Cas12c or an ortholog or homolog thereof, may comprise one or more mutations. The mutations may be artificially introduced mutations and may include but are not limited to one or more mutations in a catalytic domain.

### Guide Sequences

[0136] As used herein, the term “guide sequence” and “guide molecule” in the context of a CRISPR-Cas system, comprises any polynucleotide sequence having sufficient complementarity with a target nucleic acid sequence to hybridize with the target nucleic acid sequence and direct sequence-specific binding of a nucleic acid-targeting complex to the target nucleic acid sequence. The guide sequences made using the methods disclosed herein may be a full-length guide sequence, a truncated guide sequence, a full-length sgRNA sequence, a truncated sgRNA sequence, or an E+F sgRNA sequence. In some embodiments, the degree of complementarity of the guide sequence to a given target sequence, when optimally aligned using a suitable alignment algorithm, is about or more than about 50%, 60%, 75%, 80%, 85%, 90%, 95%, 97.5%, 99%, or more. In certain example embodiments, the guide molecule comprises a guide sequence that may be designed to have at least one mismatch with the target sequence, such that a RNA duplex formed between the guide sequence and the target sequence. Accordingly, the degree of complementarity is preferably less than 99%. For instance, where the guide sequence consists of 24 nucleotides, the degree of complementarity is more particularly about 96% or less. In particular embodiments, the guide sequence is designed to have a stretch of two or more adjacent mismatching nucleotides, such that the degree of complementarity over the entire guide sequence is further reduced. For instance, where the guide sequence consists of 24 nucleotides, the degree of complementarity is more particularly about 96% or less, more particularly, about 92% or less, more particularly about 88% or less, more particularly about 84% or less, more particularly about 80% or less, more particularly about 76% or less, more particularly about 72% or less, depending on whether the stretch of two or more mismatching nucleotides encompasses 2, 3, 4, 5, 6 or 7 nucleotides, etc. In some embodiments, aside from the stretch of one or more mismatching nucleotides, the degree of complementarity, when optimally aligned using a suitable alignment algorithm, is about or more than about 50%, 60%, 75%, 80%, 85%, 90%, 95%, 97.5%, 99%, or more. Optimal alignment may be determined with the use of any suitable algorithm for aligning sequences, non-limiting example of which include the Smith-Waterman algorithm, the Needleman-Wunsch algorithm, algorithms based on the Burrows-Wheeler Transform (e.g., the Burrows Wheeler Aligner), Clustal W, Clustal X, BLAT, Novoalign (Novocraft Technologies; available at www.novocraft.com), ELAND (Illumina, San Diego, Calif.), SOAP (available at soap.genomics.org.cn), and Maq (available at maq.sourceforge.net). The ability of a guide sequence (within a nucleic acid-targeting guide RNA) to direct sequence-specific binding of a nucleic acid-targeting complex to a target nucleic acid sequence may be assessed by any suitable assay. For example, the components of a nucleic acid-targeting CRISPR system sufficient to form a nucleic acid-targeting complex, including the guide sequence to be tested, may be provided to a host cell having the corresponding target nucleic acid sequence, such as by transfection with vectors encoding the components of the nucleic acid-targeting complex, followed by an assessment of preferential targeting (e.g., cleavage) within the target nucleic acid sequence, such as by Surveyor assay as described herein. Similarly, cleavage of a target nucleic acid sequence (or a sequence in the vicinity thereof) may be evaluated in a test tube by providing the target nucleic acid sequence, components of a nucleic acid-targeting complex, including the guide sequence to be tested and a control guide sequence different from the test guide sequence, and comparing binding or rate of cleavage at or in the vicinity of the target sequence between the test and control guide sequence reactions. Other assays are possible, and will occur to those skilled in the art. A guide sequence, and hence a nucleic acid-targeting guide RNA may be selected to target any target nucleic acid sequence.

[0137] As used herein, the term “guide sequence,” “crRNA,” “guide RNA,” or “single guide RNA,” or “gRNA” refers to a polynucleotide comprising any polynucleotide sequence having sufficient complementarity with a target nucleic acid sequence to hybridize with the target nucleic acid sequence and to direct sequence-specific binding of a RNA-targeting complex comprising the guide sequence and a CRISPR effector protein to the target nucleic acid sequence. In some example embodiments, the degree of complementarity, when optimally aligned using a suitable alignment algorithm, is about or more than about 50%, 60%, 75%, 80%, 85%, 90%, 95%, 97.5%, 99%, or more. Optimal alignment may be determined with the use of any suitable algorithm for aligning sequences, non-limiting example of which include the Smith-Waterman algorithm, the Needleman-Wunsch algorithm, algorithms based on the Burrows-Wheeler Transform (e.g., the Burrows Wheeler Aligner), Clustal W, Clustal X, BLAT, Novoalign (Novocraft Technologies; available at www.novocraft.com), ELAND (Illumina, San Diego, Calif.), SOAP (available at soap.genomics.org.cn), and Maq (available at maq.sourceforge.net). The ability of a guide sequence (within a nucleic acid-targeting guide RNA) to direct sequence-specific binding of a nucleic acid-targeting complex to a target nucleic acid sequence may be assessed by any suitable assay. For example, the components of a nucleic acid-targeting CRISPR system sufficient to form a nucleic acid-targeting complex, including the guide sequence to be tested, may be provided to a host cell having the corresponding target nucleic acid sequence, such as by transfection with vectors encoding the components of the nucleic acid-targeting complex, followed by an assessment of preferential targeting (e.g., cleavage) within the target nucleic acid sequence, such as by Surveyor assay as described herein. Similarly, cleavage of a target nucleic acid sequence may be evaluated in a test tube by providing the target nucleic acid sequence, components of a nucleic acid-targeting complex, including the guide sequence to be tested and a control guide sequence different from the test guide sequence, and comparing binding or rate of cleavage at the target sequence between the test and control guide sequence reactions. Other assays are possible, and will occur to those skilled in the art. A guide sequence, and hence a nucleic acid-targeting guide may be selected to target any target nucleic acid sequence. The target sequence may be DNA. The target sequence may be any RNA sequence. In some embodiments, the target sequence may be a sequence within a RNA molecule selected from the group consisting of messenger RNA (mRNA), pre-mRNA, ribosomal RNA (rRNA), transfer RNA (tRNA), micro-RNA (miRNA), small interfering RNA (siRNA), small nuclear RNA (snRNA), small nucleolar RNA (snoRNA), double stranded RNA (dsRNA), non-coding RNA (ncRNA), long non-coding RNA (lncRNA), and small cytoplasmatic RNA (scRNA). In some preferred embodiments, the target sequence may be a sequence within a RNA molecule selected from the group consisting of mRNA, pre-mRNA, and rRNA. In some preferred embodiments, the target sequence may be a sequence within a RNA molecule selected from the group consisting of ncRNA, and lncRNA. In some more preferred embodiments, the target sequence may be a sequence within an mRNA molecule or a pre-mRNA molecule.

[0138] In certain embodiments, the guide sequence or spacer length of the guide molecules is from 15 to 50 nt. In certain embodiments, the spacer length of the guide RNA is at least 15 nucleotides. In certain embodiments, the spacer length is from 15 to 17 nt, e.g., 15, 16, or 17 nt, from 17 to 20 nt, e.g., 17, 18, 19, or 20 nt, from 20 to 24 nt, e.g., 20, 21, 22, 23, or 24 nt, from 23 to 25 nt, e.g., 23, 24, or 25 nt, from 24 to 27 nt, e.g., 24, 25, 26, or 27 nt, from 27 to 30 nt, e.g., 27, 28, 29, or 30 nt, from 30-35 nt, e.g., 30, 31, 32, 33, 34, or 35 nt, or 35 nt or longer. In certain example embodiment, the guide sequence is 15, 16, 17, 18, 19, 20, 21, 22, 23, 24, 25, 26, 27, 28, 29, 30, 31, 32, 33, 34, 35, 36, 37, 38, 39 40, 41, 42, 43, 44, 45, 46, 47 48, 49, 50, 51, 52, 53, 54, 55, 56, 57, 58, 59, 60, 61, 62, 63, 64, 65, 66, 67, 68, 69, 70, 71, 72, 73, 74, 75, 76, 77, 78, 79, 80, 81, 82, 83, 84, 85, 86, 87, 88, 89, 90, 91, 92, 93, 94, 95, 96, 97, 98, 99, or 100 nt.

[0139] In some embodiments, the sequence of the guide molecule (direct repeat and/or spacer) is selected to reduce the degree secondary structure within the guide molecule. In some embodiments, about or less than about 75%, 50%, 40%, 30%, 25%, 20%, 15%, 10%, 5%, 1%, or fewer of the nucleotides of the nucleic acid-targeting guide RNA participate in self-complementary base pairing when optimally folded. Optimal folding may be determined by any suitable polynucleotide folding algorithm. Some programs are based on calculating the minimal Gibbs free energy. An example of one such algorithm is mFold, as described by Zuker and Stiegler (Nucleic Acids Res. 9 (1981), 133-148). Another example folding algorithm is the online webserver RNAfold, developed at Institute for Theoretical Chemistry at the University of Vienna, using the centroid structure prediction algorithm (see e.g., A. R. Gruber et al., 2008, Cell 106(1): 23-24; and P A Carr and G M Church, 2009, Nature Biotechnology 27(12): 1151-62).

[0140] In some embodiments, it is of interest to reduce the susceptibility of the guide molecule to RNA cleavage, such as to cleavage by Cas13. Accordingly, in particular embodiments, the guide molecule is adjusted to avoid cleavage by Cas13 or other RNA-cleaving enzymes.

[0141] In certain embodiments, the guide molecule comprises non-naturally occurring nucleic acids and/or non-naturally occurring nucleotides and/or nucleotide analogs, and/or chemically modifications. Preferably, these non-naturally occurring nucleic acids and non-naturally occurring nucleotides are located outside the guide sequence. Non-naturally occurring nucleic acids can include, for example, mixtures of naturally and non-naturally occurring nucleotides. Non-naturally occurring nucleotides and/or nucleotide analogs may be modified at the ribose, phosphate, and/or base moiety. In an embodiment of the invention, a guide nucleic acid comprises ribonucleotides and non-ribonucleotides. In one such embodiment, a guide comprises one or more ribonucleotides and one or more deoxyribonucleotides. In an embodiment of the invention, the guide comprises one or more non-naturally occurring nucleotide or nucleotide analog such as a nucleotide with phosphorothioate linkage, a locked nucleic acid (LNA) nucleotides comprising a methylene bridge between the 2′ and 4′ carbons of the ribose ring, or bridged nucleic acids (BNA). Other examples of modified nucleotides include 2′-0-methyl analogs, 2′-deoxy analogs, or 2′-fluoro analogs. Further examples of modified bases include, but are not limited to, 2-aminopurine, 5-bromo-uridine, pseudouridine, inosine, 7-methylguanosine. Examples of guide RNA chemical modifications include, without limitation, incorporation of 2′-O-methyl (M), 2′-O-methyl 3′phosphorothioate (MS), S-constrained ethyl(cEt), or 2′-O-methyl 3′thioPACE (MSP) at one or more terminal nucleotides. Such chemically modified guides can comprise increased stability and increased activity as compared to unmodified guides, though on-target vs. off-target specificity is not predictable. (See, Hendel, 2015, Nat Biotechnol. 33(9):985-9, doi: 10.1038/nbt.3290, published online 29 Jun. 2015 Ragdarm et al., 0215, PNAS, E7110-E7111; Allerson et al., J. Med. Chem. 2005, 48:901-904; Bramsen et al., Front. Genet., 2012, 3:154; Deng et al., PNAS, 2015, 112:11870-11875; Sharma et al., MedChemComm., 2014, 5:1454-1471; Hendel et al., Nat. Biotechnol. (2015) 33(9): 985-989; Li et al., Nature Biomedical Engineering, 2017, 1, 0066 DOI:10.1038/s41551-017-0066). In some embodiments, the 5′ and/or 3′ end of a guide RNA is modified by a variety of functional moieties including fluorescent dyes, polyethylene glycol, cholesterol, proteins, or detection tags. (See Kelly et al., 2016, J. Biotech. 233:74-83). In certain embodiments, a guide comprises ribonucleotides in a region that binds to a target RNA and one or more deoxyribonucleotides and/or nucleotide analogs in a region that binds to Cas13. In an embodiment of the invention, deoxyribonucleotides and/or nucleotide analogs are incorporated in engineered guide structures, such as, without limitation, stem-loop regions, and the seed region. For Cas13 guide, in certain embodiments, the modification is not in the 5′-handle of the stem-loop regions. Chemical modification in the 5′-handle of the stem-loop region of a guide may abolish its function (see Li, et al., Nature Biomedical Engineering, 2017, 1:0066). In certain embodiments, at least 1, 2, 3, 4, 5, 6, 7, 8, 9, 10, 11, 12, 13, 14, 15, 16, 17, 18, 19, 20, 21, 22, 23, 24, 25, 26, 27, 28, 29, 30, 35, 40, 45, 50, or 75 nucleotides of a guide is chemically modified. In some embodiments, 3-5 nucleotides at either the 3′ or the 5′ end of a guide is chemically modified. In some embodiments, only minor modifications are introduced in the seed region, such as 2′-F modifications. In some embodiments, 2′-F modification is introduced at the 3′ end of a guide. In certain embodiments, three to five nucleotides at the 5′ and/or the 3′ end of the guide are chemically modified with 2′-O-methyl (M), 2′-O-methyl 3′ phosphorothioate (MS), S-constrained ethyl(cEt), or 2′-O-methyl 3′ thioPACE (MSP). Such modification can enhance genome editing efficiency (see Hendel et al., Nat. Biotechnol. (2015) 33(9): 985-989). In certain embodiments, all of the phosphodiester bonds of a guide are substituted with phosphorothioates (PS) for enhancing levels of gene disruption. In certain embodiments, more than five nucleotides at the 5′ and/or the 3′ end of the guide are chemically modified with 2′-O-Me, 2′-F or S-constrained ethyl(cEt). Such chemically modified guide can mediate enhanced levels of gene disruption (see Ragdarm et al., 0215, PNAS, E7110-E7111). In an embodiment of the invention, a guide is modified to comprise a chemical moiety at its 3′ and/or 5′ end. Such moieties include, but are not limited to amine, azide, alkyne, thio, dibenzocyclooctyne (DBCO), or Rhodamine. In certain embodiment, the chemical moiety is conjugated to the guide by a linker, such as an alkyl chain. In certain embodiments, the chemical moiety of the modified guide can be used to attach the guide to another molecule, such as DNA, RNA, protein, or nanoparticles. Such chemically modified guide can be used to identify or enrich cells generically edited by a CRISPR system (see Lee et al., eLife, 2017, 6:e25312, DOI:10.7554).

[0142] In some embodiments, a nucleic acid-targeting guide is selected to reduce the degree secondary structure within the nucleic acid-targeting guide. In some embodiments, about or less than about 75%, 50%, 40%, 30%, 25%, 20%, 15%, 10%, 5%, 1%, or fewer of the nucleotides of the nucleic acid-targeting guide participate in self-complementary base pairing when optimally folded. Optimal folding may be determined by any suitable polynucleotide folding algorithm. Some programs are based on calculating the minimal Gibbs free energy. An example of one such algorithm is mFold, as described by Zuker and Stiegler (Nucleic Acids Res. 9 (1981), 133-148). Another example folding algorithm is the online webserver RNAfold, developed at Institute for Theoretical Chemistry at the University of Vienna, using the centroid structure prediction algorithm (see e.g., A.R. Gruber et al., 2008, Cell 106(1): 23-24; and P A Carr and G M Church, 2009, Nature Biotechnology 27(12): 1151-62).

[0143] In some embodiments, a nucleic acid-targeting guide is designed or selected to modulate intermolecular interactions among guide molecules, such as among stem-loop regions of different guide molecules. It will be appreciated that nucleotides within a guide that base-pair to form a stem-loop are also capable of base-pairing to form an intermolecular duplex with a second guide and that such an intermolecular duplex would not have a secondary structure compatible with CRISPR complex formation. Accordingly, it is useful to select or design DR sequences in order to modulate stem-loop formation and CRISPR complex formation. In some embodiments, about or less than about 75%, 50%, 40%, 30%, 25%, 20%, 15%, 10%, 5%, 1%, or fewer of nucleic acid-targeting guides are in intermolecular duplexes. It will be appreciated that stem-loop variation will often be within limits imposed by DR-CRISPR effector interactions. One way to modulate stem-loop formation or change the equilibrium between stem-loop and intermolecular duplex is to vary nucleotide pairs in the stem of the stem-loop of a DR. For example, in one embodiment, a G-C pair is replaced by an A-U or U-A pair. In another embodiment, an A-U pair is substituted for a G-C or a C-G pair. In another embodiment, a naturally occurring nucleotide is replaced by a nucleotide analog. Another way to modulate stem-loop formation or change the equilibrium between stem-loop and intermolecular duplex is to modify the loop of the stem-loop of a DR. Without be bound by theory, the loop can be viewed as an intervening sequence flanked by two sequences that are complementary to each other. When that intervening sequence is not self-complementary, its effect will be to destabilize intermolecular duplex formation. The same principle applies when guides are multiplexed: while the targeting sequences may differ, it may be advantageous to modify the stem-loop region in the DRs of the different guides. Moreover, when guides are multiplexed, the relative activities of the different guides can be modulated by balancing the activity of each individual guide. In certain embodiments, the equilibrium between intermolecular stem-loops vs. intermolecular duplexes is determined. The determination may be made by physical or biochemical means and can be in the presence or absence of a CRISPR effector.

[0144] In certain embodiments, a guide RNA or crRNA may comprise, consist essentially of, or consist of a direct repeat (DR) sequence and a guide sequence or spacer sequence. In certain embodiments, the guide RNA or crRNA may comprise, consist essentially of, or consist of a direct repeat sequence fused or linked to a guide sequence or spacer sequence. In certain embodiments, the direct repeat sequence may be located upstream (i.e., 5′) from the guide sequence or spacer sequence. In other embodiments, the direct repeat sequence may be located downstream (i.e., 3′) from the guide sequence or spacer sequence.

[0145] In certain embodiments, the crRNA comprises a stem loop, preferably a single stem loop. In certain embodiments, the direct repeat sequence forms a stem loop, preferably a single stem loop.

[0146] In certain embodiments, the spacer length of the guide RNA is from 15 to 35 nt. In certain embodiments, the spacer length of the guide RNA is at least 15 nucleotides. In certain embodiments, the spacer length is from 15 to 17 nt, e.g., 15, 16, or 17 nt, from 17 to 20 nt, e.g., 17, 18, 19, or 20 nt, from 20 to 24 nt, e.g., 20, 21, 22, 23, or 24 nt, from 23 to 25 nt, e.g., 23, 24, or 25 nt, from 24 to 27 nt, e.g., 24, 25, 26, or 27 nt, from 27-30 nt, e.g., 27, 28, 29, or 30 nt, from 30-35 nt, e.g., 30, 31, 32, 33, 34, or 35 nt, or 35 nt or longer.

[0147] In general, the CRISPR-Cas, CRISPR-Cas9 or CRISPR system may be as used in the foregoing documents, such as International Patent Publication No. WO 2014/093622 (PCT/US2013/074667) and refers collectively to transcripts and other elements involved in the expression of or directing the activity of CRISPR-associated (“Cas”) genes, including sequences encoding a Cas gene, in particular a Cas9 gene in the case of CRISPR-Cas9, a tracr (trans-activating CRISPR) sequence (e.g. tracrRNA or an active partial tracrRNA), a tracr-mate sequence (encompassing a “direct repeat” and a tracrRNA-processed partial direct repeat in the context of an endogenous CRISPR system), a guide sequence (also referred to as a “spacer” in the context of an endogenous CRISPR system), or “RNA(s)” as that term is herein used (e.g., RNA(s) to guide Cas9, e.g. CRISPR RNA and transactivating (tracr) RNA or a single guide RNA (sgRNA) (chimeric RNA)) or other sequences and transcripts from a CRISPR locus. In general, a CRISPR system is characterized by elements that promote the formation of a CRISPR complex at the site of a target sequence (also referred to as a protospacer in the context of an endogenous CRISPR system). In the context of formation of a CRISPR complex, “target sequence” refers to a sequence to which a guide sequence is designed to have complementarity, where hybridization between a target sequence and a guide sequence promotes the formation of a CRISPR complex. The section of the guide sequence through which complementarity to the target sequence is important for cleavage activity is referred to herein as the seed sequence. A target sequence may comprise any polynucleotide, such as DNA or RNA polynucleotides. In some embodiments, a target sequence is located in the nucleus or cytoplasm of a cell, and may include nucleic acids in or from mitochondrial, organelles, vesicles, liposomes or particles present within the cell. In some embodiments, especially for non-nuclear uses, NLSs are not preferred. In some embodiments, a CRISPR system comprises one or more nuclear exports signals (NESs). In some embodiments, a CRISPR system comprises one or more NLSs and one or more NESs. In some embodiments, direct repeats may be identified in silico by searching for repetitive motifs that fulfill any or all of the following criteria: 1. found in a 2Kb window of genomic sequence flanking the type II CRISPR locus; 2. span from 20 to 50 bp; and 3. interspaced by 20 to 50 bp. In some embodiments, 2 of these criteria may be used, for instance 1 and 2, 2 and 3, or 1 and 3. In some embodiments, all 3 criteria may be used.

[0148] In embodiments of the invention the terms guide sequence and guide RNA, i.e. RNA capable of guiding Cas to a target genomic locus, are used interchangeably as in foregoing cited documents such as International Patent Publication WO 2014/093622 (PCT/US2013/074667). In general, a guide sequence is any polynucleotide sequence having sufficient complementarity with a target polynucleotide sequence to hybridize with the target sequence and direct sequence-specific binding of a CRISPR complex to the target sequence. In some embodiments, the degree of complementarity between a guide sequence and its corresponding target sequence, when optimally aligned using a suitable alignment algorithm, is about or more than about 50%, 60%, 75%, 80%, 85%, 90%, 95%, 97.5%, 99%, or more. Optimal alignment may be determined with the use of any suitable algorithm for aligning sequences, non-limiting example of which include the Smith-Waterman algorithm, the Needleman-Wunsch algorithm, algorithms based on the Burrows-Wheeler Transform (e.g. the Burrows Wheeler Aligner), ClustalW, Clustal X, BLAT, Novoalign (Novocraft Technologies; available at www.novocraft.com), ELAND (Illumina, San Diego, Calif.), SOAP (available at soap.genomics.org.cn), and Maq (available at maq.sourceforge.net). In some embodiments, a guide sequence is about or more than about 5, 10, 11, 12, 13, 14, 15, 16, 17, 18, 19, 20, 21, 22, 23, 24, 25, 26, 27, 28, 29, 30, 35, 40, 45, 50, 75, or more nucleotides in length. In some embodiments, a guide sequence is less than about 75, 50, 45, 40, 35, 30, 25, 20, 15, 12, or fewer nucleotides in length. Preferably, the guide sequence is 10 30 nucleotides long. The ability of a guide sequence to direct sequence-specific binding of a CRISPR complex to a target sequence may be assessed by any suitable assay. For example, the components of a CRISPR system sufficient to form a CRISPR complex, including the guide sequence to be tested, may be provided to a host cell having the corresponding target sequence, such as by transfection with vectors encoding the components of the CRISPR sequence, followed by an assessment of preferential cleavage within the target sequence, such as by Surveyor assay as described herein. Similarly, cleavage of a target polynucleotide sequence may be evaluated in a test tube by providing the target sequence, components of a CRISPR complex, including the guide sequence to be tested and a control guide sequence different from the test guide sequence, and comparing binding or rate of cleavage at the target sequence between the test and control guide sequence reactions. Other assays are possible, and will occur to those skilled in the art.

[0149] In some embodiments of CRISPR-Cas systems, the degree of complementarity between a guide sequence and its corresponding target sequence can be about or more than about 50%, 60%, 75%, 80%, 85%, 90%, 95%, 97.5%, 99%, or 100%; a guide or RNA or sgRNA can be about or more than about 5, 10, 11, 12, 13, 14, 15, 16, 17, 18, 19, 20, 21, 22, 23, 24, 25, 26, 27, 28, 29, 30, 35, 40, 45, 50, 75, or more nucleotides in length; or guide or RNA or sgRNA can be less than about 75, 50, 45, 40, 35, 30, 25, 20, 15, 12, or fewer nucleotides in length; and advantageously tracr RNA is 30 or 50 nucleotides in length. However, an aspect of the invention is to reduce off-target interactions, e.g., reduce the guide interacting with a target sequence having low complementarity. Indeed, in the examples, it is shown that the invention involves mutations that result in the CRISPR-Cas system being able to distinguish between target and off-target sequences that have greater than 80% to about 95% complementarity, e.g., 83%-84% or 88-89% or 94-95% complementarity (for instance, distinguishing between a target having 18 nucleotides from an off-target of 18 nucleotides having 1, 2 or 3 mismatches). Accordingly, in the context of the present invention the degree of complementarity between a guide sequence and its corresponding target sequence is greater than 94.5% or 95% or 95.5% or 96% or 96.5% or 97% or 97.5% or 98% or 98.5% or 99% or 99.5% or 99.9%, or 100%. Off target is less than 100% or 99.9% or 99.5% or 99% or 99% or 98.5% or 98% or 97.5% or 97% or 96.5% or 96% or 95.5% or 95% or 94.5% or 94% or 93% or 92% or 91% or 90% or 89% or 88% or 87% or 86% or 85% or 84% or 83% or 82% or 81% or 80% complementarity between the sequence and the guide, with it advantageous that off target is 100% or 99.9% or 99.5% or 99% or 99% or 98.5% or 98% or 97.5% or 97% or 96.5% or 96% or 95.5% or 95% or 94.5% complementarity between the sequence and the guide.

### Cancer Fusion Genes

[0150] Fusion genes and their transcripts are chimeras resulting from separate genes with aberrant functions, with the results transcript leading to potential aberrant expression levels, functions and sites, many of which have been identified in various cancer types. Due to the oncogenic potential of the chimeric protein generated through fusions. Sources of cancer fusion genes and research describing can be found, for example, in the Catalogue of Somatic Mutations in Cancer (SOMATIC), available at cancer.sanger.ac.uk/cosmic/fusion.

[0151] Exemplary cancer fusions that can be used in accordance with the present invention include: ZSCAN30_ENST00000333206-BRAF, ZNF700_ENST00000254321-MAST1, ZCCHC8-ROS1, ZC3H7B-BCOR, YWHAE-NUTM2B, YWHAE-NUTM2A, WDCP-ALK, VTI1A-TCF7L2_ENST00000369397, VCL-ALK, UBE2L3_ENST00000342192-KRAS_ENST00000311936, TRIM33-RET, TRIM27-RET, TRIM24-RET, TRIM24-BRAF, TPR-NTRK1_ENST00000392302, TPR-ALK, TPM4_ENST00000300933-ALK, TPM3_ENST00000368533-ROS1, TPM3_ENST00000368533-NTRK1_ENST00000392302, TPM3_ENST00000368533-ALK, TPM3-ROS1, TP53-NTRK1_ENST00000392302, TMPRSS2_ENST00000332149-ETV5, TMPRSS2_ENST00000332149-ETV4, TMPRSS2_ENST00000332149-ETV1, TMPRSS2_ENST00000332149-ERG_ENST00000442448, THRAP3-USP6_ENST00000250066, TFG-NTRK1_ENST00000392302, TFG-NR4A3 ENST00000395097, TFG-ALK, TECTA-TBCEL_ENST00000529397, TCF3-PBX1, TCF12-NR4A3_ENST00000395097, TCEA1-PLAG1, TBL1XR1-TP63, TAF15_ENST00000604841-NR4A3_ENST00000395097, TADA2A-MAST1, SUSD1_ENST00000374270-PTBP3_ENST00000374255, STRN-ALK, STIL_ENST00000360380-TAL1_ENST00000371884, SSH2_ENST00000269033-SUZ12, SSBP2_ENST00000320672-JAK2, SS18L1-SSX1, SS18-USP6_ENST00000250066, SS18-SSX4B, SS18-SSX2, SS18-SSX1, SRGAP3-RAF1, SQSTM1-ALK, SND1-BRAF, SLC45A3-ETV5, SLC45A3-ETV1, SLC45A3-ERG_ENST00000442448, SLC45A3-ELK4, SLC45A3-BRAF, SLC3A2-NRG1, SLC34A2-ROS1, SLC26A6-PRKAR2A, SLC22A1-CUTA_ENST00000440279, SHTN1_ENST00000615301-ROS1, SFPQ-TFE3, SET_ENST00000322030-NUP214, SEPT8_ENST00000296873-AFF4, SEC31A_ENST00000348405-JAK2, SEC31A_ENST00000348405-ALK, SEC16A-NOTCH1, SDC4-ROS1, RUNX1-RUNX1T1_ENST00000360348, RNF130-BRAF, RGS22-SYCP1_ENST00000369518, RELCH-RET,

[0152] RBM14-PACS1, RANBP2-ALK, RAF1-DAZL_ENST00000399444, QKI-NTRK2_ENST00000376214, PWWP2A_ENST00000456329-ROS1, PTPRK_ENST00000368226-RSPO3, PRKAR1A_ENST00000358598-RET, PRCC-TFE3, PPFIBP1_ENST00000228425-ROS1, PPFIBP1_ENST00000228425-ALK, PML-RARA, PLXND1-TMCC1, PLA2R1-RBMS1, PCM1-RET, PCM1-JAK2, PAX8_ENST00000429538-PPARG, PAX7-FOXO1, PAX5-JAK2, PAX3-NCOA2, PAX3-NCOA1, PAX3-FOXO1, OMD-USP6_ENST00000250066, NUP98-KDM5A, NUP214-ABL1_ENST00000318560, NUP107-LGR5, NTN1-ACLY, NPM1_ENST00000517671-ALK, NOTCH1-GABBR2, NONO-TFE3, NFIX_ENST00000360105-MAST1, NFIA_ENST00000485903-EHF_ENST00000257831, NF1-ASIC2, NDRG1_ENST00000323851-ERG_ENST00000442448, NCOA4-RET, NACC2_ENST00000371753-NTRK2_ENST00000376214, NAB2-STAT6, MYO5A-ROS1, MYB-NFIB_ENST00000397581, MSN-ALK, MN1-ETV6, MKRN1-BRAF, MIA2_ENST00000280083-GEMIN2, MEAF6-PHF1, MBTD1-CXorf67, MBOAT2-PRKCE, LSM14A-BRAF, LRIG3 -ROS1, LMNA-NTRK1_ENST00000392302, LIFR-PLAG1, KTN1-RET, KMT2A-ZFYVE19, KMT2A-TOP3A ENST00000321105, KMT2A-TET1, KMT2A-SORB S2_ENST00000284776, KMT2A-SH3GL1, KMT2A-SEPT9, KMT2A-SEPT6, KMT2A-SEPTS, KMT2A-SEPT2_ENST00000360051, KMT2A-SARNP, KMT2A-PRRC1_ENST00000296666, KMT2A-PICALM, KMT2A-PD S 5A, KMT2A-NRIP3, KMT2A-NCKIPSD, KMT2A-MYO1F, KMT2A-MLLT6, KMT2A-MLLT3, KMT2A-MLLT11, KMT2A-MLLT10_ENST00000377072, KMT2A-MLLT1, KMT2A-MAPRE1, KMT2A-LPP, KMT2A-LASP1, KMT2A-KNL1, KMT2A-GPHN, KMT2A-GMPS, KMT2A-GAS7, KMT2A-FRYL, KMT2A-FOXO4, KMT2A-FOXO3 ENST00000343882, KMT2A-EPS15, KMT2A-EP300, KMT2A-ELL, KMT2A-EEFSEC, KMT2A-DAB2IP_ENST00000309989, KMT2A-CT45A2_ENST00000612907, KMT2A-CREBBP, KMT2A-CIP2A, KMT2A-CEP170B, KMT2A-CBL, KMT2A-CASP8AP2, KMT2A-BTBD18, KMT2A-ARHGEF12, KMT2A-ARHGAP26, KMT2A-AFF4, KMT2A-AFF3, KMT2A-AFF1_ENST00000307808, KMT2A-AFDN_ENST00000392108, KMT2A-ACTN4, KMT2A-ABI2_ENST00000261017, KMT2A-ABI1, KLK2-ETV4, KLK2-ETV1, KLC1_ENST00000389744-ALK, KIFSB-RET, KIFSB-ALK, KIAA1549_ENST00000440172-BRAF, JPT1-USH1G, JAZF 1-SUZ12, JAZF 1-PHF 1, IRF2BP2-CDX1, INTS4-GAB2, IL6R-ATP8B2, HOOK3-RET, HNRNPA2B1_ENST00000356674-ETV1, HMGA2_ENST00000403681-WIF 1, HMGA2_ENST00000403681-RAD51B_ENST00000487270, HMGA2_ENST00000403681-NFIB_ENST00000397581, HMGA2_ENST00000403681-LPP, HMGA2_ENST00000403681-LHFPL6, HMGA2_ENST00000403681-FHIT_ENST00000476844, HMGA2_ENST00000403681-EBF 1, HMGA2_ENST00000403681-COX6C_ENST00000297564, HMGA2_ENST00000403681-CCNB1IP1_ENST00000358932, HMGA2_ENST00000403681-ALDH2, HLA-A-ROS1, HIP1-ALK, HEY1_ENST00000354724-NCOA2, HERPUD1_ENST00000300302-BRAF, HAS2-PLAG1, HACL1-RAF1, GPBP1L1_ENST00000290795-MAST2, GOPC-ROS1, GOLGAS-RET, GNAI1-BRAF, GMDS-PDE8B, GATM-BRAF, FUS-FEV, FUS-ERG_ENST00000442448, FUS-DDIT3 ENST00000547303, FUS-CREB3L2, FUS-CREB3L1, FUS-ATF1, FN1 ENST00000336916-ALK, FGFR3_ENST00000440486-TACC3, FGFR3_ENST00000440486-BAIAP2L1, FGER1_ENST00000447712-ZNF703, FGFR1_ENST00000447712-TACC1, FGFR1_ENST00000447712-PLAG1, FCHSD1-BRAF, FBXL18-RNF216, FAM131B-BRAF, EZR-ROS1, EZR-ERBB4, EWSR1_ENST00000397938-ZNF444, EWSR1_ENST00000397938-ZNF384_ENST00000319770, EWSR1_ENST00000397938-YY1, EWSR1_ENST00000397938-WT1, EWSR1_ENST00000397938-SP3, EWSR1_ENST00000397938-SMARCA5, EWSR1_ENST00000397938-POU5F1, EWSR1_ENST00000397938-PBX1, EWSR1_ENST00000397938-PATZ1_ENST00000215919, EWSR1_ENST00000397938-NR4A3_ENST00000395097, EWSR1_ENST00000397938-NFATC2, EWSR1_ENST00000397938-NFATC1_ENST00000329101, EWSR1_ENST00000397938-MYB, EWSR1_ENST00000397938-FLI1, EWSR1_ENST00000397938-FEV, EWSR1_ENST00000397938-ETV4, EWSR1_ENST00000397938-ETV1, EWSR1_ENST00000397938-ERG ENST00000442448, EWSR1_ENST00000397938-DDIT3_ENST00000547303, EWSR1_ENST00000397938-CREB1, EWSR1_ENST00000397938-ATF 1, ETV6-RUNX1, ETV6-PDGFRB, ETV6-NTRK3_ENST00000394480, ETV6-JAK2, ETV6-ITPR2, ETV6-ABL1_ENST00000318560, ESRP1_ENST00000358397-RAF1, ERO1A-FERMT2_ENST00000395631, ERC1_ENST00000360905-ROS1, ERC1_ENST00000360905-RET, EPC1-PHF1, EML4-ALK, EIF3K-CYP39A1, EIF3E-RSPO2, DNAJB1-PRKACA, DHH-RHEBL1, DDXS-ETV4, DCTN1-ALK, CTNNB1 ENST00000349496-PLAG1, CRTC3-MAML2, CRTC1 ENST00000321949-MAML2, COL1A2-PLAG1, COL1A1 -USP6_ENST00000250066, COL1A1-PDGFB, CNBP_ENST00000422453-USP6_ENST00000250066, CLTC_ENST00000269122-TFE3, CLTC ENST00000269122-ALK, CLIP1_ENST00000358808-ROS1, CLCN6-BRAF, CIC_ENST00000160740-FOXO4, CIC_ENST00000160740-DUX4, CHCHD7_ENST00000355315-PLAG1, CEP89-BRAF, CENPK-KMT2A, CDKN2D ENST00000335766-WDFY2, CDH11-USP6 ENST00000250066, CD74-ROS1, CD74-NRG1, CCDC6-RET, CBFA2T3-GLIS2, CARS ENST00000397111-ALK, CANT1_ENST00000392446-ETV4, BRD4-NUTM1_ENST00000333756, BRD3-NUTM1_ENST00000333756, BCR-JAK2, BCR-ABL1_ENST00000318560, BBS9-PKD1L1, ATIC-ALK, ATG4C ENST00000371120-FBXO38_ENST00000340253, ASPSCR1_ENST00000306739-TFE3, ARID1A-MAST2, ARFIP1_ENST00000353617-FHDC1_ENST00000260008, AKAP9-BRAF, AGTRAP-BRAF, AGPATS-MCPH1, ACTB-GLI1, ACSL3-ETV1, and ACBD6 ENST00000367595-RRP15. Target sequences of the fusion genes can be identified and utilized for generating optimized guide according to the presently disclosed methods. The optimized guides can optionally be used with amplification reagents that may provide further specifically designed primers for the target sequence, fusion gene, or specific translocation for the identified cancer.

[0153] In an aspect, the cancer is selected from acute promyelocytic leukemia (APML), chronic myeloid leukemia (CIVIL), and/or acute lymphoblastic leukemia (ALL). The target in some aspects is referred to herein as a short APML or a long APML target which refers to transcripts from the long and short isoforms of the PML/RARA fusion associated with acute promyelocytic leukemia (APML). The guides may be directed to PML-RARa Intron/exon 6 fusion, PML-RARa Intron 3 fusion, and/or BCR-ABL p210 b3a2 fusion. The BCR-ABL fusion results from a reciprocal balanced translocation between chromosomes 9 and 22. Identification of these fusion variants is critical for diagnosing APL, CML, and ALL. APML with PML-RARa is a variant type of acute myeloid leukemia (AML) that is primarily associated with the t(15;17)(q22;q11-12) translocation. The fusion gene BCR-ABL1, attributed to the t(9;22) translocation, is associated with CML. In embodiments, the BCR-ABL fusion is the BCR-ABL p210 b3a2 fusion, b2a2 fusion, or a p190 ela2 fusion. See, Pane et al., Oncogene (2002) 21, 8652-8667; Ayatollahi et al, Caspian J Intern Med. 2018, 9(1):65-70; doi:10.22088/cjim.9.1.65. In an aspect, the methods disclosed herein utilize optimized guide RNAs developed with the machine learning model disclosed herein. In certain embodiments, the optimized guide RNAs can detect primary variants of the PML-RARA fusion transcript associated with t(15;17) in acute promyelocytic leukemia (APL), and a common variant of the BCR-ABL oncogene fusion transcript of chronic myeloid leukemia (CIVIL) and a subset of patients with acute lymphoblastic leukemia (ALL) (FIG. 5A-5F). BCR-ABL transcript

[0154] One or more cancers can be detected via cancer fusion genes in a multiplexing approach. Provided herein are engineered polynucleotide sequences that can direct the activity of a CRISPR protein to multiple targets using a single crRNA. The engineered polynucleotide sequences, also referred to as a multiplexing polynucleotides, can include two or more direct repeats interspersed with two or more guide sequences. More specifically, the engineered polynucleotide sequences can include a direct repeat sequence having one or more mutations relative to the corresponding wild type direct repeat sequence. The engineered polynucleotide can be configured, for example, as: 5′ DR1-G1-DR2-G2 3′. In some embodiments, the engineered polynucleotide can be configured to include three, four, five, or more additional direct repeat and guide sequences, for example: 5′ DR1-G1-DR2-G2-DR3-G3 3′, 5″ DR1-G1-DR2-G2-DR3-G3-DR4-G4 3′, or 5′ DR1-G1-DR2-G2-DR3-G3-DR4-G4-DR5-G5 3′.

[0155] Regardless of the number of direct repeat sequences, the direct repeat sequences differ from one another. Thus, DRl can be a wild type sequence and DR2 can include one or more mutations relative to the wild type sequence in accordance with the disclosure provided herein regarding direct repeats for Cas orthologs. The guide sequences can also be the same or different. In some embodiments, the guide sequences can bind to different nucleic acid targets, for example, nucleic acids encoding different polypeptides. The multiplexing polynucleotides can be as described, for example, at [0039]-[0072] in U.S. Application 62/780,748 entitled “CRISPR Cpf1 Direct Repeat Variants” and filed Dec. 17, 2018, see also U.S. Ser. No. 16/718,155, each of which is incorporated herein in its entirety by reference.

### Guide Modifications

[0156] In certain embodiments, guides of the invention comprise non-naturally occurring nucleic acids and/or non-naturally occurring nucleotides and/or nucleotide analogs, and/or chemical modifications. Non-naturally occurring nucleic acids can include, for example, mixtures of naturally and non-naturally occurring nucleotides. Non-naturally occurring nucleotides and/or nucleotide analogs may be modified at the ribose, phosphate, and/or base moiety. In an embodiment of the invention, a guide nucleic acid comprises ribonucleotides and non-ribonucleotides. In one such embodiment, a guide comprises one or more ribonucleotides and one or more deoxyribonucleotides. In an embodiment of the invention, the guide comprises one or more non-naturally occurring nucleotide or nucleotide analog such as a nucleotide with phosphorothioate linkage, boranophosphate linkage, a locked nucleic acid (LNA) nucleotides comprising a methylene bridge between the 2′ and 4′ carbons of the ribose ring, or bridged nucleic acids (BNA). Other examples of modified nucleotides include 2′-O-methyl analogs, 2′-deoxy analogs, 2-thiouridine analogs, N6-methyladenosine analogs, or 2′-fluoro analogs. Further examples of modified bases include, but are not limited to, 2-aminopurine, 5-bromo-uridine, pseudouridine (Ψ), N1-methylpseudouridine (me1Ψ), 5-methoxyuridine(5moU), inosine, 7-methylguanosine. Examples of guide RNA chemical modifications include, without limitation, incorporation of 2′-0-methyl (M), 2′-O-methyl-3′-phosphorothioate (MS), phosphorothioate (PS), S-constrained ethyl(cEt), or 2′-O-methyl-3′-thioPACE (MSP) at one or more terminal nucleotides. Such chemically modified guides can comprise increased stability and increased activity as compared to unmodified guides, though on-target vs. off-target specificity is not predictable. (See, Hendel, 2015, Nat Biotechnol. 33(9):985-9, doi: 10.1038/nbt.3290, published online 29 Jun. 2015; Ragdarm et al., 0215, PNAS, E7110-E7111; Allerson et al., J. Med. Chem. 2005, 48:901-904; Bramsen et al., Front. Genet., 2012, 3:154; Deng et al., PNAS, 2015, 112:11870-11875; Sharma et al., MedChemComm., 2014, 5:1454-1471; Hendel et al., Nat. Biotechnol. (2015) 33(9): 985-989; Li et al., Nature Biomedical Engineering, 2017, 1, 0066 DOI:10.1038/s41551-017-0066). In some embodiments, the 5′ and/or 3′ end of a guide RNA is modified by a variety of functional moieties including fluorescent dyes, polyethylene glycol, cholesterol, proteins, or detection tags. (See Kelly et al., 2016, J. Biotech. 233:74-83). In certain embodiments, a guide comprises ribonucleotides in a region that binds to a target DNA and one or more deoxyribonucleotides and/or nucleotide analogs in a region that binds to Cas9, Cpf1, or C2c1. In an embodiment of the invention, deoxyribonucleotides and/or nucleotide analogs are incorporated in engineered guide structures, such as, without limitation, 5′ and/or 3′ end, stem-loop regions, and the seed region. In certain embodiments, the modification is not in the 5′-handle of the stem-loop regions. Chemical modification in the 5′-handle of the stem-loop region of a guide may abolish its function (see Li, et al., Nature Biomedical Engineering, 2017, 1:0066). In certain embodiments, at least 1, 2, 3, 4, 5, 6, 7, 8, 9, 10, 11, 12, 13, 14, 15, 16, 17, 18, 19, 20, 21, 22, 23, 24, 25, 26, 27, 28, 29, 30, 35, 40, 45, 50, or 75 nucleotides of a guide is chemically modified. In some embodiments, 3-5 nucleotides at either the 3′ or the 5′ end of a guide is chemically modified. In some embodiments, only minor modifications are introduced in the seed region, such as 2′-F modifications. In some embodiments, 2′-F modification is introduced at the 3′ end of a guide. In certain embodiments, three to five nucleotides at the 5′ and/or the 3′ end of the guide are chemically modified with 2′-O-methyl (M), 2′-O-methyl-3′-phosphorothioate (MS), S-constrained ethyl(cEt), or 2′-O-methyl-3′-thioPACE (MSP). Such modification can enhance genome editing efficiency (see Hendel et al., Nat. Biotechnol. (2015) 33(9): 985-989). In certain embodiments, all of the phosphodiester bonds of a guide are substituted with phosphorothioates (PS) for enhancing levels of gene disruption. In certain embodiments, more than five nucleotides at the 5′ and/or the 3′ end of the guide are chemically modified with 2′-O-Me, 2′-F or S-constrained ethyl(cEt). Such chemically modified guide can mediate enhanced levels of gene disruption (see Ragdarm et al., 0215, PNAS, E7110-E7111). In an embodiment of the invention, a guide is modified to comprise a chemical moiety at its 3′ and/or 5′ end. Such moieties include, but are not limited to amine, azide, alkyne, thio, dibenzocyclooctyne (DBCO), or Rhodamine. In certain embodiment, the chemical moiety is conjugated to the guide by a linker, such as an alkyl chain. In certain embodiments, the chemical moiety of the modified guide can be used to attach the guide to another molecule, such as DNA, RNA, protein, or nanoparticles. Such chemically modified guide can be used to identify or enrich cells generically edited by a CRISPR system (see Lee et al., eLife, 2017, 6:e25312, DOI:10.7554).

[0157] In certain embodiments, the CRISPR system as provided herein can make use of a crRNA or analogous polynucleotide comprising a guide sequence, wherein the polynucleotide is an RNA, a DNA or a mixture of RNA and DNA, and/or wherein the polynucleotide comprises one or more nucleotide analogs. The sequence can comprise any structure, including but not limited to a structure of a native crRNA, such as a bulge, a hairpin or a stem loop structure. In certain embodiments, the polynucleotide comprising the guide sequence forms a duplex with a second polynucleotide sequence which can be an RNA or a DNA sequence.

[0158] In certain embodiments, use is made of chemically modified guide RNAs. Examples of guide RNA chemical modifications include, without limitation, incorporation of 2′-O-methyl (M), 2′-O-methyl 3′phosphorothioate (MS), or 2′-O-methyl 3′thioPACE (MSP) at one or more terminal nucleotides. Such chemically modified guide RNAs can comprise increased stability and increased activity as compared to unmodified guide RNAs, though on-target vs. off-target specificity is not predictable. (See, Hendel, 2015, Nat Biotechnol. 33(9):985-9, doi: 10.1038/nbt.3290, published online 29 June 2015). Chemically modified guide RNAs further include, without limitation, RNAs with phosphorothioate linkages and locked nucleic acid (LNA) nucleotides comprising a methylene bridge between the 2′ and 4′ carbons of the ribose ring.

[0159] In some embodiments, a guide sequence is about or more than about 5, 10, 11, 12, 13, 14, 15, 16, 17, 18, 19, 20, 21, 22, 23, 24, 25, 26, 27, 28, 29, 30, 35, 40, 45, 50, 75, or more nucleotides in length. In some embodiments, a guide sequence is less than about 75, 50, 45, 40, 35, 30, 25, 20, 15, 12, or fewer nucleotides in length. Preferably the guide sequence is 10 to 30 nucleotides long. The ability of a guide sequence to direct sequence-specific binding of a CRISPR complex to a target sequence may be assessed by any suitable assay. For example, the components of a CRISPR system sufficient to form a CRISPR complex, including the guide sequence to be tested, may be provided to a host cell having the corresponding target sequence, such as by transfection with vectors encoding the components of the CRISPR sequence, followed by an assessment of preferential cleavage within the target sequence, such as by Surveyor assay. Similarly, cleavage of a target RNA may be evaluated in a test tube by providing the target sequence, components of a CRISPR complex, including the guide sequence to be tested and a control guide sequence different from the test guide sequence, and comparing binding or rate of cleavage at the target sequence between the test and control guide sequence reactions. Other assays are possible, and will occur to those skilled in the art.

[0160] In some embodiments, the modification to the guide is a chemical modification, an insertion, a deletion or a split. In some embodiments, the chemical modification includes, but is not limited to, incorporation of 2′-O-methyl (M) analogs, 2′-deoxy analogs, 2-thiouridine analogs, N6-methyladenosine analogs, 2′-fluoro analogs, 2-aminopurine, 5-bromo-uridine, pseudouridine (Ψ), N1-methylpseudouridine (me1Ψ), 5-methoxyuridine(5moU), inosine, 7-methylguanosine, 2′ -O-methyl-3′-phosphorothioate (MS), S-constrained ethyl(cEt), phosphorothioate (PS), or 2′-O-methyl-3′-thioPACE (MSP). In some embodiments, the guide comprises one or more of phosphorothioate modifications. In certain embodiments, at least 1, 2, 3, 4, 5, 6, 7, 8, 9, 10, 11, 12, 13, 14, 15, 16, 17, 18, 19, 20, or 25 nucleotides of the guide are chemically modified. In certain embodiments, one or more nucleotides in the seed region are chemically modified. In certain embodiments, one or more nucleotides in the 3′-terminus are chemically modified. In certain embodiments, none of the nucleotides in the 5′-handle is chemically modified. In some embodiments, the chemical modification in the seed region is a minor modification, such as incorporation of a 2′-fluoro analog. In a specific embodiment, one nucleotide of the seed region is replaced with a 2′-fluoro analog. In some embodiments, 5 or 10 nucleotides in the 3′ -terminus are chemically modified. Such chemical modifications at the 3′-terminus of the Cpf1 CrRNA improve gene cutting efficiency (see Li, et al., Nature Biomedical Engineering, 2017, 1:0066). In a specific embodiment, 5 nucleotides in the 3′-terminus are replaced with 2′-fluoro analogues. In a specific embodiment, 10 nucleotides in the 3′-terminus are replaced with 2′-fluoro analogues. In a specific embodiment, 5 nucleotides in the 3′-terminus are replaced with 2′-O-methyl (M) analogs.

[0161] In some embodiments, the loop of the 5′-handle of the guide is modified. In some embodiments, the loop of the 5′-handle of the guide is modified to have a deletion, an insertion, a split, or chemical modifications. In certain embodiments, the loop comprises 3, 4, or 5 nucleotides. In certain embodiments, the loop comprises the sequence of UCUU, UUUU, UAUU, or UGUU.

[0162] A guide sequence, and hence a nucleic acid-targeting guide RNA may be selected to target any target nucleic acid sequence. In the context of formation of a CRISPR complex, “target sequence” refers to a sequence to which a guide sequence is designed to have complementarity, where hybridization between a target sequence and a guide sequence promotes the formation of a CRISPR complex. A target sequence may comprise RNA polynucleotides. The term “target RNA” refers to a RNA polynucleotide being or comprising the target sequence. In other words, the target RNA may be a RNA polynucleotide or a part of a RNA polynucleotide to which a part of the gRNA, i.e. the guide sequence, is designed to have complementarity and to which the effector function mediated by the complex comprising CRISPR effector protein and a gRNA is to be directed. In some embodiments, a target sequence is located in the nucleus or cytoplasm of a cell. The target sequence may be DNA. The target sequence may be any RNA sequence. In some embodiments, the target sequence may be a sequence within a RNA molecule selected from the group consisting of messenger RNA (mRNA), pre-mRNA, ribosomal RNA (rRNA), transfer RNA (tRNA), micro-RNA (miRNA), small interfering RNA (siRNA), small nuclear RNA (snRNA), small nuclear RNA (snoRNA), double stranded RNA (dsRNA), non-coding RNA (ncRNA), long non-coding RNA (lncRNA), and small cytoplasmic RNA (scRNA). In some preferred embodiments, the target sequence may be a sequence within a RNA molecule selected from the group consisting of mRNA, pre-mRNA, and rRNA. In some preferred embodiments, the target sequence may be a sequence within a RNA molecule selected from the group consisting of ncRNA, and lncRNA. In some more preferred embodiments, the target sequence may be a sequence within an mRNA molecule or a pre-mRNA molecule.

[0163] In certain embodiments, the spacer length of the guide RNA is less than 28 nucleotides. In certain embodiments, the spacer length of the guide RNA is at least 18 nucleotides and less than 28 nucleotides. In certain embodiments, the spacer length of the guide RNA is between 19 and 28 nucleotides. In certain embodiments, the spacer length of the guide RNA is between 19 and 25 nucleotides. In certain embodiments, the spacer length of the guide RNA is 20 nucleotides. In certain embodiments, the spacer length of the guide RNA is 23 nucleotides. In certain embodiments, the spacer length of the guide RNA is 25 nucleotides.

[0164] In certain embodiments, modulations of cleavage efficiency can be exploited by introduction of mismatches, e.g. 1 or more mismatches, such as 1 or 2 mismatches between spacer sequence and target sequence, including the position of the mismatch along the spacer/target. The more central (i.e. not 3′ or 5′) for instance a double mismatch is, the more cleavage efficiency is affected. Accordingly, by choosing mismatch position along the spacer, cleavage efficiency can be modulated. By means of example, if less than 100% cleavage of targets is desired (e.g. in a cell population), 1 or more, such as preferably 2 mismatches between spacer and target sequence may be introduced in the spacer sequences. The more central along the spacer of the mismatch position, the lower the cleavage percentage.

[0165] In certain example embodiments, the cleavage efficiency may be exploited to design single guides that can distinguish two or more targets that vary by a single nucleotide, such as a single nucleotide polymorphism (SNP), variation, or (point) mutation. The CRISPR effector may have reduced sensitivity to SNPs (or other single nucleotide variations) and continue to cleave SNP targets with a certain level of efficiency. Thus, for two targets, or a set of targets, a guide RNA may be designed with a nucleotide sequence that is complementary to one of the targets i.e. the on-target SNP. The guide RNA is further designed to have a synthetic mismatch. As used herein a “synthetic mismatch” refers to a non-naturally occurring mismatch that is introduced upstream or downstream of the naturally occurring SNP, such as at most 5 nucleotides upstream or downstream, for instance 4, 3, 2, or 1 nucleotide upstream or downstream, preferably at most 3 nucleotides upstream or downstream, more preferably at most 2 nucleotides upstream or downstream, most preferably 1 nucleotide upstream or downstream (i.e. adjacent the SNP). When the CRISPR effector binds to the on-target SNP, only a single mismatch will be formed with the synthetic mismatch and the CRISPR effector will continue to be activated and a detectable signal produced. When the guide RNA hybridizes to an off-target SNP, two mismatches will be formed, the mismatch from the SNP and the synthetic mismatch, and no detectable signal generated. Thus, the systems disclosed herein may be designed to distinguish SNPs within a population. For, example the systems may be used to distinguish pathogenic strains that differ by a single SNP or detect certain disease specific SNPs, such as but not limited to, disease associated SNPs, such as without limitation cancer associated SNPs.

[0166] In certain embodiments, the guide RNA is designed such that the SNP is located on position 1, 2, 3, 4, 5, 6, 7, 8, 9, 10, 11, 12, 13, 14, 15, 16, 17, 18, 19, 20, 21, 22, 23, 24, 25, 26, 27, 28, 29, or 30 of the spacer sequence (starting at the 5′ end). In certain embodiments, the guide RNA is designed such that the SNP is located on position 1, 2, 3, 4, 5, 6, 7, 8, or 9 of the spacer sequence (starting at the 5′ end). In certain embodiments, the guide RNA is designed such that the SNP is located on position 2, 3, 4, 5, 6, or 7of the spacer sequence (starting at the 5′ end). In certain embodiments, the guide RNA is designed such that the SNP is located on position 3, 4, 5, or 6 of the spacer sequence (starting at the 5′ end). In certain embodiments, the guide RNA is designed such that the SNP is located on position 3 of the spacer sequence (starting at the 5′ end).

[0167] In certain embodiments, the guide RNA is designed such that the mismatch (e.g. the synthetic mismatch, i.e. an additional mutation besides a SNP) is located on position 1, 2, 3, 4, 5, 6, 7, 8, 9, 10, 11, 12, 13, 14, 15, 16, 17, 18, 19, 20, 21, 22, 23, 24, 25, 26, 27, 28, 29, or 30 of the spacer sequence (starting at the 5′ end). In certain embodiments, the guide RNA is designed such that the mismatch is located on position 1, 2, 3, 4, 5, 6, 7, 8, or 9 of the spacer sequence (starting at the 5′ end). In certain embodiments, the guide RNA is designed such that the mismatch is located on position 4, 5, 6, or 7 of the spacer sequence (starting at the 5′ end. In certain embodiments, the guide RNA is designed such that the mismatch is located at position 3, 4, 5, or 6 of the spacer, preferably position 3. In certain embodiments, the guide RNA is designed such that the mismatch is located on position 5 of the spacer sequence (starting at the 5′ end).

[0168] In certain embodiments, said mismatch is 1, 2, 3, 4, or 5 nucleotides upstream or downstream, preferably 2 nucleotides, preferably downstream of said SNP or other single nucleotide variation in said guide RNA.

[0169] In certain embodiments, the guide RNA is designed such that the mismatch is located 2 nucleotides upstream of the SNP (i.e. one intervening nucleotide).

[0170] In certain embodiments, the guide RNA is designed such that the mismatch is located 2 nucleotides downstream of the SNP (i.e. one intervening nucleotide).

[0171] In certain embodiments, the guide RNA is designed such that the mismatch is located on position 5 of the spacer sequence (starting at the 5′ end) and the SNP is located on position 3 of the spacer sequence (starting at the 5′ end).

[0172] In certain embodiments, the guide RNA comprises a spacer which is truncated relative to a wild type spacer. In certain embodiments, the guide RNA comprises a spacer which comprises less than 28 nucleotides, preferably between and including 20 to 27 nucleotides.

[0173] In certain embodiments, the guide RNA comprises a spacer which consists of 20-25 nucleotides or 20-23 nucleotides, such as preferably 20 or 23 nucleotides.

[0174] In certain embodiments, the one or more guide RNAs are designed to detect a single nucleotide polymorphism in a target RNA or DNA, or a splice variant of an RNA transcript.

[0175] In certain embodiments, the one or more guide RNAs may be designed to bind to one or more target molecules that are diagnostic for a disease state. In some embodiments, the disease may be cancer. In some embodiments, the disease state may be an autoimmune disease. In some embodiments, the disease state may be an infection. In some embodiments, the infection may be caused by a virus, a bacterium, a fungus, a protozoa, or a parasite. In specific embodiments, the infection is a viral infection. In specific embodiments, the viral infection is caused by a DNA virus.

[0176] The embodiments described herein comprehend inducing one or more nucleotide modifications in a eukaryotic cell (in vitro, i.e. in an isolated eukaryotic cell) as herein discussed comprising delivering to cell a vector as herein discussed. The mutation(s) can include the introduction, deletion, or substitution of one or more nucleotides at each target sequence of cell(s) via the guide(s) RNA(s). The mutations can include the introduction, deletion, or substitution of 1-75 nucleotides at each target sequence of said cell(s) via the guide(s) RNA(s). The mutations can include the introduction, deletion, or substitution of 1, 5, 10, 11, 12, 13, 14, 15, 16, 17, 18, 19, 20, 21, 22, 23, 24, 25, 26, 27, 28, 29, 30, 35, 40, 45, 50, or 75 nucleotides at each target sequence of said cell(s) via the guide(s) RNA(s). The mutations can include the introduction, deletion, or substitution of 5, 10, 11, 12, 13, 14, 15, 16, 17, 18, 19, 20, 21, 22, 23, 24, 25, 26, 27, 28, 29, 30, 35, 40, 45, 50, or 75 nucleotides at each target sequence of said cell(s) via the guide(s) RNA(s) . The mutations include the introduction, deletion, or substitution of 10, 11, 12, 13, 14, 15, 16, 17, 18, 19, 20, 21, 22, 23, 24, 25, 26, 27, 28, 29, 30, 35, 40, 45, 50, or 75 nucleotides at each target sequence of said cell(s) via the guide(s) RNA(s). The mutations can include the introduction, deletion, or substitution of 20, 21, 22, 23, 24, 25, 26, 27, 28, 29, 30, 35, 40, 45, 50, or 75 nucleotides at each target sequence of said cell(s) via the guide(s) RNA(s). The mutations can include the introduction, deletion, or substitution of 40, 45, 50, 75, 100, 200, 300, 400 or 500 nucleotides at each target sequence of said cell(s) via the guide(s) RNA(s).

[0177] Typically, in the context of an endogenous CRISPR system, formation of a CRISPR complex (comprising a guide sequence hybridized to a target sequence and complexed with one or more Cas proteins) results in cleavage in or near (e.g. within 1, 2, 3, 4, 5, 6, 7, 8, 9, 10, 20, 50, or more base pairs from) the target sequence, but may depend on for instance secondary structure, in particular in the case of RNA targets. In certain embodiments, the orthologs may comprise one or more orthologs Alicyclobacillus macrosporangiidus strain DSM 17980, Bacillus hisashii strain C4, Candidatus Lindowbacteria bacterium RIFCSPLOWO2, Elusimicrobia bacterium RIFOXYA12, Omnitrophica WOR_2 bacterium RIFCSPHIGHO2, Phycisphaerae bacterium ST-NAGAB-D1, Planctomycetes bacterium RBG_13_46_10,) Spirochaetes bacterium GWB1_27_13, Verrucomicrobiaceae bacterium UBA2429(.

### Optimized Guides

[0178] A method for designing guide RNAs for use in the detection systems may comprise the steps of designing putative guide RNAs tiled across a target molecule of interest; creating a training model based on results of incubating guide RNAs with a Cas13 protein and the target molecule; predicting highly active guide RNAs for the target molecule, wherein the predicting comprises optimizing the nucleotide at each base position in the guide RNA based on the training model; and validating the predicted highly active guide RNAs by incubating the guide RNAs with the Cas13 protein and the target molecule.

[0179] In certain instances, the optimized guide for the target molecule is generated by pooling a set of guides, the guides produced by tiling guides across the target molecule; incubating the set of guides with a Cas polypeptide and the target molecule and measuring cleavage activity of each guide in the set; creating a training model based on the cleavage activity of the set of guides in the incubating step. Steps of predicting highly active guides for the target molecule and identifying the optimized guides by incubating the predicted highly active guides with the Cas polypeptide and the target molecule and selecting optimized guides may also be utilized in generating optimized guides. In embodiments, the training model comprises one or more input features selected from guide sequence, flanking target sequence, normalized positions of the guide in the target and guide GC content. In certain instances, the guide sequence and/or flanking sequence input comprises one hit encoding mono-nucleotide and/or dinucleotide In an embodiments, the training model comprises applying logistic regression model on the activity of the guides across the one or more input features.

[0180] In an aspect, the predicting highly active guides for the target molecule comprises selecting guides with an increase in activity of a guide relative to the median activity, or selecting guides with highest guide activity. In certain instances, the increase in activity is measured by an increase in fluorescence. Guides may be selected based on a particular cutoff, in certain instances based on activity relative to a median or above a particular cutoff-, for instance, are selected with a 1.5, 2, 2.5 or 3-fold activity relative to median, or are in the top quartile or quintile for each target tested.

[0181] In particular embodiments, the target is a fusion cancer target. In embodiments, one or more cancers are detected, in an aspect, the cancer is selected from acute promyelocytic leukemia (APML), chronic myeloid leukemia (CIVIL), and/or acute lymphoblastic leukemia (ALL). The target in some aspects is a short APML or a long APML target. In embodiments, transcripts from the long and short isoforms of the PML/RARA fusion associated with acute promyelocytic leukemia (APML) are targeted. The guides may be directed to PML-RARa Intron/exon 6 fusion, PML-RARa Intron 3 fusion, and/or BCR-ABL p210 b3a2 fusion. In embodiments, the BCR-ABL fusion is the BCR-ABL p210 b3a2 fusion, b2a2 fusion, or a p190 e1a2 fusion.

[0182] The optimized guides may be generated for a Cas13 ortholog. In some instances, the optimized guide is generated for a Leptotrichia wadei (Lwa) Cas13a or a Capnocytophaga canimorsus Cc5 (Cca) Cas13b ortholog.

[0183] In some embodiments, the invention provides a method for designing guide RNAs for use in the detection systems described herein. The method may comprise designing putative guide RNAs tiled across a target molecule of interest. The method may further comprise creating a training model based on results of incubating guide RNAs with a Cas13 protein and the target molecule. The method may further comprise predicting highly active guide RNAs for the target molecule. Predicting may comprise optimizing the nucleotide at each base position in the guide RNA based on the training model. The method may further comprise validating the predicted highly active guide RNAs by incubating the guide RNAs with the Cas13 protein and the target molecule.

[0184] The design of putative guide RNAs for target molecules of interest is described elsewhere herein.

[0185] The creation of training models is known in the art. Machine learning can be generalized as the ability of a learning machine to perform accurately on new, unseen examples/tasks after having experienced a learning data set. Machine learning may include the following concepts and methods. Supervised learning concepts may include AODE; Artificial neural network, such as Backpropagation, Autoencoders, Hopfield networks, Boltzmann machines, Restricted Boltzmann Machines, and Spiking neural networks; Bayesian statistics, such as Bayesian network and Bayesian knowledge base; Case-based reasoning; Gaussian process regression; Gene expression programming; Group method of data handling (GMDH); Inductive logic programming; Instance-based learning; Lazy learning; Learning Automata; Learning Vector Quantization; Logistic Model Tree; Minimum message length (decision trees, decision graphs, etc.), such as Nearest Neighbor Algorithm and Analogical modeling; Probably approximately correct learning (PAC) learning; Ripple down rules, a knowledge acquisition methodology; Symbolic machine learning algorithms; Support vector machines; Random Forests; Ensembles of classifiers, such as Bootstrap aggregating (bagging) and Boosting (meta-algorithm); Ordinal classification; Information fuzzy networks (IFN); Conditional Random Field; ANOVA; Linear classifiers, such as Fisher's linear discriminant, Linear regression, Logistic regression, Multinomial logistic regression, Naive Bayes classifier, Perceptron, Support vector machines; Quadratic classifiers; k-nearest neighbor; Boosting; Decision trees, such as C4.5, Random forests, ID3, CART, SLIQ, SPRINT; Bayesian networks, such as Naive Bayes; and Hidden Markov models. Unsupervised learning concepts may include; Expectation-maximization algorithm; Vector Quantization; Generative topographic map; Information bottleneck method; Artificial neural network, such as Self-organizing map; Association rule learning, such as, Apriori algorithm, Eclat algorithm, and FP-growth algorithm; Hierarchical clustering, such as Single-linkage clustering and Conceptual clustering; Cluster analysis, such as, K-means algorithm, Fuzzy clustering, DBSCAN, and OPTICS algorithm; and Outlier Detection, such as Local Outlier Factor. Semi-supervised learning concepts may include; Generative models; Low-density separation; Graph-based methods; and Co-training. Reinforcement learning concepts may include; Temporal difference learning; Q-learning; Learning Automata; and SARSA. Deep learning concepts may include; Deep belief networks; Deep Boltzmann machines; Deep Convolutional neural networks; Deep Recurrent neural networks; and Hierarchical temporal memory.

[0186] The methods as disclosed herein designing putative guide molecules may comprise design based on one or more variables, including guide sequence, flanking target sequence, guide position and guide GC content as input features. In certain embodiments, the length of the flanking target region can be considered a free parameter and can be further selected during cross-validation. Additionally, mono-nucleotide and/or dinucleotide based identities across a guide length and flanking sequence in the target, varying one or more of flanking sequence length, normalized positions of the guide in the target, and GC content of the guide, or a combination thereof.

[0187] In embodiments, the training model for the guide design is Cas protein specific. In embodiments, the Cas protein is a Cas13a, Cas13b or Cas12 a protein. In certain embodiments, the protein is LwaCas13a or CcaCas13b. Selection for the best guides can be dependent on each enzyme. In particular embodiments, where majority of guides have activity above background on a per-target basis, selection of guides may be based on 1.5 fold, 2, 2.5, 3 or more fold activity over the median activity. In other instances, the best performing guides may be at or near background fluorescence. In this instance, the guide selection may be based on a top percentile, e.g. quartile or quintile, of performing guides.

[0188] Codon optimization is described elsewhere herein. In specific embodiments, the nucleotide at each base position in the guide RNA may be optimized based on the training model, thus allowing for prediction of highly active guide RNAs for the target molecule. In certain instances, mono-nucleotide and/or dinucleotide based identities across a guide length and flanking sequence in the target may be optimized.

[0189] The predicted highly active guide RNAs may then be validated or verified by incubating the guide molecules with a Cas polypeptide, such as Cas13 protein and the target molecule, as described in the examples.

[0190] In certain embodiments, optimization comprises validation of best performing models for a particular Cas polypeptide across multiple guides may comprise comparing the predicted score of each guide versus actual collateral activity upon target recognition. In embodiments, kinetic data of the best and worst predicted guides are evaluated. In embodiments, lateral flow performance of the predicted guides is evaluated for a target sequence.

### Detection Constructs

[0191] As used herein, a “detection construct” refers to a molecule that can be cleaved or otherwise deactivated by an activated CRISPR system effector protein described herein. The term “detection construct” may also be referred to in the alternative as a “masking construct.” Depending on the nuclease activity of the CRISPR effector protein, the masking construct may be a RNA-based masking construct or a DNA-based masking construct. The Nucleic Acid-based masking constructs comprises a nucleic acid element that is cleavable by a CRISPR effector protein. Cleavage of the nucleic acid element releases agents or produces conformational changes that allow a detectable signal to be produced. Example constructs demonstrating how the nucleic acid element may be used to prevent or mask generation of detectable signal are described below and embodiments of the invention comprise variants of the same. Prior to cleavage, or when the masking construct is in an ‘active’ state, the masking construct blocks the generation or detection of a positive detectable signal. It will be understood that in certain example embodiments a minimal background signal may be produced in the presence of an active masking construct. A positive detectable signal may be any signal that can be detected using optical, fluorescent, chemiluminescent, electrochemical or other detection methods known in the art. The term “positive detectable signal” is used to differentiate from other detectable signals that may be detectable in the presence of the masking construct. For example, in certain embodiments a first signal may be detected when the masking agent is present or when a CRISPR system has not been activated (i.e. a negative detectable signal), which then converts to a second signal (e.g. the positive detectable signal) upon detection of the target molecules and cleavage or deactivation of the masking agent, or upon activation of the CRISPR effector protein. The positive detectable signal, then, is a signal detected upon activation of the CRISPR effector protein, and may be, in a colorimetric or fluorescent assay, a decrease in fluorescence or color relative to a control or an increase in fluorescence or color relative to a control, depending on the configuration of the lateral flow substrate, and as described further herein.

[0192] In certain example embodiments, the masking construct may comprise a HCR initiator sequence and a cutting motif, or a cleavable structural element, such as a loop or hairpin, that prevents the initiator from initiating the HCR reaction. The cutting motif may be preferentially cut by one of the activated CRISPR effector proteins. Upon cleavage of the cutting motif or structure element by an activated CRISPR effector protein, the initiator is then released to trigger the HCR reaction, detection thereof indicating the presence of one or more targets in the sample. In certain example embodiments, the masking construct comprises a hairpin with a RNA loop. When an activated CRISPR effector protein cuts the RNA loop, the initiator can be released to trigger the HCR reaction.

[0193] In certain example embodiments, the masking construct may suppress generation of a gene product. The gene product may be encoded by a reporter construct that is added to the sample. The masking construct may be an interfering RNA involved in a RNA interference pathway, such as a short hairpin RNA (shRNA) or small interfering RNA (siRNA). The masking construct may also comprise microRNA (miRNA). While present, the masking construct suppresses expression of the gene product. The gene product may be a fluorescent protein or other RNA transcript or proteins that would otherwise be detectable by a labeled probe, aptamer, or antibody but for the presence of the masking construct. Upon activation of the effector protein the masking construct is cleaved or otherwise silenced allowing for expression and detection of the gene product as the positive detectable signal.

[0194] In specific embodiments, the masking construct comprises a silencing RNA that suppresses generation of a gene product encoded by a reporting construct, wherein the gene product generates the detectable positive signal when expressed.

[0195] In certain example embodiments, the masking construct may sequester one or more reagents needed to generate a detectable positive signal such that release of the one or more reagents from the masking construct results in generation of the detectable positive signal. The one or more reagents may combine to produce a colorimetric signal, a chemiluminescent signal, a fluorescent signal, or any other detectable signal and may comprise any reagents known to be suitable for such purposes. In certain example embodiments, the one or more reagents are sequestered by RNA aptamers that bind the one or more reagents. The one or more reagents are released when the effector protein is activated upon detection of a target molecule and the RNA or DNA aptamers are degraded.

[0196] In certain example embodiments, the masking construct may be immobilized on a solid substrate in an individual discrete volume (defined further below) and sequesters a single reagent. For example, the reagent may be a bead comprising a dye. When sequestered by the immobilized reagent, the individual beads are too diffuse to generate a detectable signal, but upon release from the masking construct are able to generate a detectable signal, for example by aggregation or simple increase in solution concentration. In certain example embodiments, the immobilized masking agent is a RNA- or DNA-based aptamer that can be cleaved by the activated effector protein upon detection of a target molecule.

[0197] In certain other example embodiments, the masking construct binds to an immobilized reagent in solution thereby blocking the ability of the reagent to bind to a separate labeled binding partner that is free in solution. Thus, upon application of a washing step to a sample, the labeled binding partner can be washed out of the sample in the absence of a target molecule. However, if the effector protein is activated, the masking construct is cleaved to a degree sufficient to interfere with the ability of the masking construct to bind the reagent thereby allowing the labeled binding partner to bind to the immobilized reagent. Thus, the labeled binding partner remains after the wash step indicating the presence of the target molecule in the sample. In certain aspects, the masking construct that binds the immobilized reagent is a DNA or RNA aptamer. The immobilized reagent may be a protein and the labeled binding partner may be a labeled antibody. Alternatively, the immobilized reagent may be streptavidin and the labeled binding partner may be labeled biotin. The label on the binding partner used in the above embodiments may be any detectable label known in the art. In addition, other known binding partners may be used in accordance with the overall design described herein.

[0198] In certain example embodiments, the masking construct may comprise a ribozyme. Ribozymes are RNA molecules having catalytic properties. Ribozymes, both naturally and engineered, comprise or consist of RNA that may be targeted by the effector proteins disclosed herein. The ribozyme may be selected or engineered to catalyze a reaction that either generates a negative detectable signal or prevents generation of a positive control signal. Upon deactivation of the ribozyme by the activated effector protein, the reaction generating a negative control signal, or preventing generation of a positive detectable signal, is removed thereby allowing a positive detectable signal to be generated. In one example embodiment, the ribozyme may catalyze a colorimetric reaction causing a solution to appear as a first color. When the ribozyme is deactivated the solution then turns to a second color, the second color being the detectable positive signal. An example of how ribozymes can be used to catalyze a colorimetric reaction are described in Zhao et al. “Signal amplification of glucosamine-6-phosphate based on ribozyme glmS,” Biosens Bioelectron. 2014; 16:337-42, and provide an example of how such a system could be modified to work in the context of the embodiments disclosed herein. Alternatively, ribozymes, when present can generate cleavage products of, for example, RNA transcripts. Thus, detection of a positive detectable signal may comprise detection of non-cleaved RNA transcripts that are only generated in the absence of the ribozyme.

[0199] In some embodiments, the masking construct may be a ribozyme that generates a negative detectable signal, and wherein a positive detectable signal is generated when the ribozyme is deactivated.

[0200] In certain example embodiments, the one or more reagents is a protein, such as an enzyme, capable of facilitating generation of a detectable signal, such as a colorimetric, chemiluminescent, or fluorescent signal, that is inhibited or sequestered such that the protein cannot generate the detectable signal by the binding of one or more DNA or RNA aptamers to the protein. Upon activation of the effector proteins disclosed herein, the DNA or RNA aptamers are cleaved or degraded to an extent that they no longer inhibit the protein's ability to generate the detectable signal. In certain example embodiments, the aptamer is a thrombin inhibitor aptamer. In certain example embodiments the thrombin inhibitor aptamer has a sequence of GGGAACAAAGCUGAAGUACUUACCC (SEQ ID NO: 8). When this aptamer is cleaved, thrombin will become active and will cleave a peptide colorimetric or fluorescent substrate. In certain example embodiments, the colorimetric substrate is para-nitroanilide (pNA) covalently linked to the peptide substrate for thrombin. Upon cleavage by thrombin, pNA is released and becomes yellow in color and easily visible to the eye. In certain example embodiments, the fluorescent substrate is 7-amino-4-methylcoumarin a blue fluorophore that can be detected using a fluorescence detector. Inhibitory aptamers may also be used for horseradish peroxidase (HRP), beta-galactosidase, or calf alkaline phosphatase (CAP) and within the general principals laid out above.

[0201] In certain embodiments, RNAse or DNAse activity is detected colorimetrically via cleavage of enzyme-inhibiting aptamers. One potential mode of converting DNAse or RNAse activity into a colorimetric signal is to couple the cleavage of a DNA or RNA aptamer with the re-activation of an enzyme that is capable of producing a colorimetric output. In the absence of RNA or DNA cleavage, the intact aptamer will bind to the enzyme target and inhibit its activity. The advantage of this readout system is that the enzyme provides an additional amplification step: once liberated from an aptamer via collateral activity (e.g. Cpf1 collateral activity), the colorimetric enzyme will continue to produce colorimetric product, leading to a multiplication of signal.

[0202] In certain embodiments, an existing aptamer that inhibits an enzyme with a colorimetric readout is used. Several aptamer/enzyme pairs with colorimetric readouts exist, such as thrombin, protein C, neutrophil elastase, and subtilisin. These proteases have colorimetric substrates based upon pNA and are commercially available. In certain embodiments, a novel aptamer targeting a common colorimetric enzyme is used. Common and robust enzymes, such as beta-galactosidase, horseradish peroxidase, or calf intestinal alkaline phosphatase, could be targeted by engineered aptamers designed by selection strategies such as SELEX. Such strategies allow for quick selection of aptamers with nanomolar binding efficiencies and could be used for the development of additional enzyme/aptamer pairs for colorimetric readout.

[0203] In certain embodiments, the masking construct may be a DNA or RNA aptamer and/or may comprise a DNA or RNA-tethered inhibitor.

[0204] In certain embodiments, the masking construct may comprise a DNA or RNA oligonucleotide to which a detectable ligand and a masking component are attached.

[0205] In certain embodiments, RNAse or DNase activity is detected colorimetrically via cleavage of RNA-tethered inhibitors. Many common colorimetric enzymes have competitive, reversible inhibitors: for example, beta-galactosidase can be inhibited by galactose. Many of these inhibitors are weak, but their effect can be increased by increases in local concentration. By linking local concentration of inhibitors to DNase RNAse activity, colorimetric enzyme and inhibitor pairs can be engineered into DNase and RNAse sensors. The colorimetric DNase or RNAse sensor based upon small-molecule inhibitors involves three components: the colorimetric enzyme, the inhibitor, and a bridging RNA or DNA that is covalently linked to both the inhibitor and enzyme, tethering the inhibitor to the enzyme. In the uncleaved configuration, the enzyme is inhibited by the increased local concentration of the small molecule; when the DNA or RNA is cleaved (e.g. by Cas13 or Cas12 collateral cleavage), the inhibitor will be released and the colorimetric enzyme will be activated.

[0206] In certain embodiments, the aptamer or DNA- or RNA-tethered inhibitor may sequester an enzyme, wherein the enzyme generates a detectable signal upon release from the aptamer or DNA or RNA tethered inhibitor by acting upon a substrate. In some embodiments, the aptamer may be an inhibitor aptamer that inhibits an enzyme and prevents the enzyme from catalyzing generation of a detectable signal from a substance. In some embodiments, the DNA- or RNA-tethered inhibitor may inhibit an enzyme and may prevent the enzyme from catalyzing generation of a detectable signal from a substrate.

[0207] In certain embodiments, RNAse activity is detected colorimetrically via formation and/or activation of G-quadruplexes. G quadruplexes in DNA can complex with heme (iron (III)-protoporphyrin IX) to form a DNAzyme with peroxidase activity. When supplied with a peroxidase substrate (e.g. ABTS: (2,2′-Azinobis [3-ethylbenzothiazoline-6-sulfonic acid]-diammonium salt)), the G-quadruplex-heme complex in the presence of hydrogen peroxide causes oxidation of the substrate, which then forms a green color in solution. An example G-quadruplex forming DNA sequence is: GGGTAGGGCGGGTTGGGA (SEQ ID NO: 9). By hybridizing an additional DNA or RNA sequence, referred to herein as a “staple,” to this DNA aptamer, formation of the G-quadraplex structure will be limited. Upon collateral activation, the staple will be cleaved allowing the G quadraplex to form and heme to bind. This strategy is particularly appealing because color formation is enzymatic, meaning there is additional amplification beyond collateral activation.

[0208] In certain embodiments, the masking construct may comprise an RNA oligonucleotide designed to bind a G-quadruplex forming sequence, wherein a G-quadruplex structure is formed by the G-quadruplex forming sequence upon cleavage of the masking construct, and wherein the G-quadruplex structure generates a detectable positive signal.

[0209] In certain example embodiments, the masking construct may be immobilized on a solid substrate in an individual discrete volume (defined further below) and sequesters a single reagent. For example, the reagent may be a bead comprising a dye. When sequestered by the immobilized reagent, the individual beads are too diffuse to generate a detectable signal, but upon release from the masking construct are able to generate a detectable signal, for example by aggregation or simple increase in solution concentration. In certain example embodiments, the immobilized masking agent is a DNA- or RNA-based aptamer that can be cleaved by the activated effector protein upon detection of a target molecule.

[0210] In one example embodiment, the masking construct comprises a detection agent that changes color depending on whether the detection agent is aggregated or dispersed in solution. For example, certain nanoparticles, such as colloidal gold, undergo a visible purple to red color shift as they move from aggregates to dispersed particles. Accordingly, in certain example embodiments, such detection agents may be held in aggregate by one or more bridge molecules. At least a portion of the bridge molecule comprises RNA or DNA. Upon activation of the effector proteins disclosed herein, the RNA or DNA portion of the bridge molecule is cleaved allowing the detection agent to disperse and resulting in the corresponding change in color. In certain example embodiments, the detection agent is a colloidal metal. The colloidal metal material may include water-insoluble metal particles or metallic compounds dispersed in a liquid, a hydrosol, or a metal sol. The colloidal metal may be selected from the metals in groups IA, IB, IIB and IIIB of the periodic table, as well as the transition metals, especially those of group VIII. Preferred metals include gold, silver, aluminum, ruthenium, zinc, iron, nickel and calcium. Other suitable metals also include the following in all of their various oxidation states: lithium, sodium, magnesium, potassium, scandium, titanium, vanadium, chromium, manganese, cobalt, copper, gallium, strontium, niobium, molybdenum, palladium, indium, tin, tungsten, rhenium, platinum, and gadolinium. The metals are preferably provided in ionic form, derived from an appropriate metal compound, for example the A13+, Ru3+, Zn2+, Fe3+, Ni2+ and Ca2+ ions.

[0211] When the RNA or DNA bridge is cut by the activated CRISPR effector, the aforementioned color shift is observed. In certain example embodiments, the particles are colloidal metals. In certain other example embodiments, the colloidal metal is a colloidal gold. In certain example embodiments, the colloidal nanoparticles are 15 nm gold nanoparticles (AuNPs). Due to the unique surface properties of colloidal gold nanoparticles, maximal absorbance is observed at 520 nm when fully dispersed in solution and appear red in color to the naked eye. Upon aggregation of AuNPs, they exhibit a red-shift in maximal absorbance and appear darker in color, eventually precipitating from solution as a dark purple aggregate. In certain example embodiments the nanoparticles are modified to include DNA linkers extending from the surface of the nanoparticle. Individual particles are linked together by single-stranded RNA (ssRNA) or single-stranded DNA bridges that hybridize on each end to at least a portion of the DNA linkers. Thus, the nanoparticles will form a web of linked particles and aggregate, appearing as a dark precipitate. Upon activation of the CRISPR effectors disclosed herein, the ssRNA or ssDNA bridge will be cleaved, releasing the AU NPS from the linked mesh and producing a visible red color. Example DNA linkers and bridge sequences are listed below. Thiol linkers on the end of the DNA linkers may be used for surface conjugation to the AuNPS. Other forms of conjugation may be used. In certain example embodiments, two populations of AuNPs may be generated, one for each DNA linker. This will help facilitate proper binding of the ssRNA bridge with proper orientation. In certain example embodiments, a first DNA linker is conjugated by the 3′ end while a second DNA linker is conjugated by the 5′ end.

[0212] In certain other example embodiments, the masking construct may comprise an RNA or DNA oligonucleotide to which are attached a detectable label and a masking agent of that detectable label. An example of such a detectable label/masking agent pair is a fluorophore and a quencher of the fluorophore. Quenching of the fluorophore can occur as a result of the formation of a non-fluorescent complex between the fluorophore and another fluorophore or non-fluorescent molecule. This mechanism is known as ground-state complex formation, static quenching, or contact quenching. Accordingly, the RNA or DNA oligonucleotide may be designed so that the fluorophore and quencher are in sufficient proximity for contact quenching to occur. Fluorophores and their cognate quenchers are known in the art and can be selected for this purpose by one having ordinary skill in the art. The particular fluorophore/quencher pair is not critical in the context of this invention, only that selection of the fluorophore/quencher pairs ensures masking of the fluorophore. Upon activation of the effector proteins disclosed herein, the RNA or DNA oligonucleotide is cleaved thereby severing the proximity between the fluorophore and quencher needed to maintain the contact quenching effect. Accordingly, detection of the fluorophore may be used to determine the presence of a target molecule in a sample.

[0213] In certain other example embodiments, the masking construct may comprise one or more RNA oligonucleotides to which are attached one or more metal nanoparticles, such as gold nanoparticles. In some embodiments, the masking construct comprises a plurality of metal nanoparticles crosslinked by a plurality of RNA or DNA oligonucleotides forming a closed loop. In one embodiment, the masking construct comprises three gold nanoparticles crosslinked by three RNA or DNA oligonucleotides forming a closed loop. In some embodiments, the cleavage of the RNA or DNA oligonucleotides by the CRISPR effector protein leads to a detectable signal produced by the metal nanoparticles.

[0214] In certain other example embodiments, the masking construct may comprise one or more RNA or DNA oligonucleotides to which are attached one or more quantum dots. In some embodiments, the cleavage of the RNA or DNA oligonucleotides by the CRISPR effector protein leads to a detectable signal produced by the quantum dots.

[0215] In one example embodiment, the masking construct may comprise a quantum dot. The quantum dot may have multiple linker molecules attached to the surface. At least a portion of the linker molecule comprises RNA or DNA. The linker molecule is attached to the quantum dot at one end and to one or more quenchers along the length or at terminal ends of the linker such that the quenchers are maintained in sufficient proximity for quenching of the quantum dot to occur. The linker may be branched. As above, the quantum dot/quencher pair is not critical, only that selection of the quantum dot/quencher pair ensures masking of the fluorophore. Quantum dots and their cognate quenchers are known in the art and can be selected for this purpose by one having ordinary skill in the art. Upon activation of the effector proteins disclosed herein, the RNA or DNA portion of the linker molecule is cleaved thereby eliminating the proximity between the quantum dot and one or more quenchers needed to maintain the quenching effect. In certain example embodiments the quantum dot is streptavidin conjugated. RNA or DNA are attached via biotin linkers and recruit quenching molecules with the sequences /5Biosg/UCUCGUACGUUC/3IAbRQSp/ (SEQ ID NO: 10) or /5Biosg/UCUCGUACGUUCUCUCGUACGUUC/3IAbRQSp/ (SEQ ID NO: 11) where /5Biosg/ is a biotin tag and /31AbRQSp/ is an Iowa black quencher (Iowa Black FQ). Upon cleavage, by the activated effectors disclosed herein the quantum dot will fluoresce visibly.

[0216] In specific embodiments, the detectable ligand may be a fluorophore and the masking component may be a quencher molecule.

[0217] In a similar fashion, fluorescence energy transfer (FRET) may be used to generate a detectable positive signal. FRET is a non-radiative process by which a photon from an energetically excited fluorophore (i.e. “donor fluorophore”) raises the energy state of an electron in another molecule (i.e. “the acceptor”) to higher vibrational levels of the excited singlet state. The donor fluorophore returns to the ground state without emitting a fluoresce characteristic of that fluorophore. The acceptor can be another fluorophore or non-fluorescent molecule. If the acceptor is a fluorophore, the transferred energy is emitted as fluorescence characteristic of that fluorophore. If the acceptor is a non-fluorescent molecule the absorbed energy is loss as heat. Thus, in the context of the embodiments disclosed herein, the fluorophore/quencher pair is replaced with a donor fluorophore/acceptor pair attached to the oligonucleotide molecule. When intact, the masking construct generates a first signal (negative detectable signal) as detected by the fluorescence or heat emitted from the acceptor. Upon activation of the effector proteins disclosed herein the RNA oligonucleotide is cleaved and FRET is disrupted such that fluorescence of the donor fluorophore is now detected (positive detectable signal).

[0218] In certain example embodiments, the masking construct comprises the use of intercalating dyes which change their absorbance in response to cleavage of long RNAs or DNAs to short nucleotides. Several such dyes exist. For example, pyronine-Y will complex with RNA and form a complex that has an absorbance at 572 nm. Cleavage of the RNA results in loss of absorbance and a color change. Methylene blue may be used in a similar fashion, with changes in absorbance at 688 nm upon RNA cleavage. Accordingly, in certain example embodiments the masking construct comprises a RNA and intercalating dye complex that changes absorbance upon the cleavage of RNA by the effector proteins disclosed herein.

[0219] In certain example embodiments, the masking construct may comprise an initiator for an HCR reaction. See e.g. Dirks and Pierce. PNAS 101, 15275-15728 (2004). HCR reactions utilize the potential energy in two hairpin species. When a single-stranded initiator having a portion of complementary to a corresponding region on one of the hairpins is released into the previously stable mixture, it opens a hairpin of one species. This process, in turn, exposes a single-stranded region that opens a hairpin of the other species. This process, in turn, exposes a single stranded region identical to the original initiator. The resulting chain reaction may lead to the formation of a nicked double helix that grows until the hairpin supply is exhausted. Detection of the resulting products may be done on a gel or colorimetrically. Example colorimetric detection methods include, for example, those disclosed in Lu et al. “Ultra-sensitive colorimetric assay system based on the hybridization chain reaction-triggered enzyme cascade amplification ACS Appl Mater Interfaces, 2017, 9(1):167-175, Wang et al. “An enzyme-free colorimetric assay using hybridization chain reaction amplification and split aptamers” Analyst 2015, 150, 7657-7662, and Song et al. “Non covalent fluorescent labeling of hairpin DNA probe coupled with hybridization chain reaction for sensitive DNA detection.” Applied Spectroscopy, 70(4): 686-694 (2016).

[0220] In certain example embodiments, the masking construct suppresses generation of a detectable positive signal until cleaved, or modified by an activated CRISPR effector protein. In some embodiments, the masking construct may suppress generation of a detectable positive signal by masking the detectable positive signal, or generating a detectable negative signal instead.

### Samples

[0221] Samples to be screened are loaded at the sample loading portion of the lateral flow substrate. The samples must be liquid samples or samples dissolved in an appropriate solvent, usually aqueous. The liquid sample reconstitutes the SHERLOCK reagents such that a SHERLOCK reaction can occur. The liquid sample begins to flow from the sample portion of the substrate towards the first and second capture regions.

[0222] A sample for use with the invention may be a biological or environmental sample, such as a surface sample, a fluid sample, or a food sample (fresh fruits or vegetables, meats). Food samples may include a beverage sample, a paper surface, a fabric surface, a metal surface, a wood surface, a plastic surface, a soil sample, a freshwater sample, a wastewater sample, a saline water sample, exposure to atmospheric air or other gas sample, or a combination thereof. For example, household/commercial/industrial surfaces made of any materials including, but not limited to, metal, wood, plastic, rubber, or the like, may be swabbed and tested for contaminants. Soil samples may be tested for the presence of pathogenic bacteria or parasites, or other microbes, both for environmental purposes and/or for human, animal, or plant disease testing. Water samples such as freshwater samples, wastewater samples, or saline water samples can be evaluated for cleanliness and safety, and/or potability, to detect the presence of, for example, Cryptosporidium parvum, Giardia lamblia, or other microbial contamination. In further embodiments, a biological sample may be obtained from a source including, but not limited to, a tissue sample, saliva, blood, plasma, sera, stool, urine, sputum, mucous, lymph, synovial fluid, spinal fluid, cerebrospinal fluid, ascites, pleural effusion, seroma, pus, bile, aqueous or vitreous humor, transudate, exudate, or swab of skin or a mucosal membrane surface. In some particular embodiments, an environmental sample or biological samples may be crude samples and/or the one or more target molecules may not be purified or amplified from the sample prior to application of the method. Identification of microbes may be useful and/or needed for any number of applications, and thus any type of sample from any source deemed appropriate by one of skill in the art may be used in accordance with the invention.

Methods for Detecting and/or Quantifying Target Nucleic Acids

[0223] In some embodiments, the invention provides methods for detecting target nucleic acids in a sample. Such methods may comprise contacting a sample with the first end of a lateral flow device as described herein. The first end of the lateral flow device may comprise a sample loading portion, wherein the sample flows from the sample loading portion of the substrate towards the first and second capture regions and generates a detectable signal.

[0224] A positive detectable signal may be any signal that can be detected using optical, fluorescent, chemiluminescent, electrochemical or other detection methods known in the art, as described elsewhere herein.

[0225] In some embodiments, the lateral flow device may be capable of detecting two different target nucleic acid sequences. In some embodiments, this detection of two different target nucleic acid sequences may occur simultaneously.

[0226] In some embodiments, the absence of target nucleic acid sequences in a sample elicits a detectable fluorescent signal at each capture region. In such instances, the absence of any target nucleic acid sequences in a sample may cause a detectable signal to appear at the first and second capture regions.

[0227] In some embodiments, the lateral flow device as described herein is capable of detecting three different target nucleic acid sequences. In specific embodiments, when the target nucleic acid sequences are absent from the sample, a fluorescent signal may be generated at each of the three capture regions. In such exemplary embodiments, a fluorescent signal may be absent at the capture region for the corresponding target nucleic acid sequence when the sample contains one or more target nucleic acid sequences.

[0228] Samples to be screened are loaded at the sample loading portion of the lateral flow substrate. The samples must be liquid samples or samples dissolved in an appropriate solvent, usually aqueous. The liquid sample reconstitutes the system reagents such that a SHERLOCK reaction can occur. Intact reporter construct is bound at the first capture region by binding between the first binding agent and the first molecule. Likewise, the detection agent will begin to collect at the first binding region by binding to the second molecule on the intact reporter construct. If target molecule(s) are present in the sample, the CRISPR effector protein collateral effect is activated. As activated CRISPR effector protein comes into contact with the bound reporter construct, the reporter constructs are cleaved, releasing the second molecule to flow further down the lateral flow substrate towards the second binding region. The released second molecule is then captured at the second capture region by binding to the second binding agent, where additional detection agent may also accumulate by binding to the second molecule. Accordingly, if the target molecule(s) is not present in the sample, a detectable signal will appear at the first capture region, and if the target molecule(s) is present in the sample, a detectable signal will appear at the location of the second capture region.

[0229] In some embodiments, the invention provides a method for quantifying target nucleic acids in samples comprising distributing a sample or set of samples into one or more individual discrete volumes comprising two or more CRISPR systems as described herein. The method may comprise using HDA to amplify one or more target molecules in the sample or set of samples, as described herein. The method may further comprise incubating the sample or set of samples under conditions sufficient to allow binding of the guide RNAs to one or more target molecules. The method may further comprise activating the CRISPR effector protein via binding of the guide RNAs to the one or more target molecules. Activating the CRISPR effector protein may result in modification of the detection construct such that a detectable positive signal is generated. The method may further comprise detecting the one or more detectable positive signals, wherein detection indicates the presence of one or more target molecules in the sample. The method may further comprise comparing the intensity of the one or more signals to a control to quantify the nucleic acid in the sample. The steps of amplifying, incubating, activating, and detecting may all be performed in the same individual discrete volume.

### Amplifying Target Molecules

[0230] The step of amplifying one or more target molecules can comprise amplification systems known in the art. In some embodiments, amplification is isothermal. In certain example embodiments, target RNAs and/or DNAs may be amplified prior to activating the CRISPR effector protein. Any suitable RNA or DNA amplification technique may be used. In certain example embodiments, the RNA or DNA amplification is an isothermal amplification. In certain example embodiments, the isothermal amplification may be nucleic-acid sequenced-based amplification (NASBA), recombinase polymerase amplification (RPA), loop-mediated isothermal amplification (LAMP), strand displacement amplification (SDA), helicase-dependent amplification (HDA), or nicking enzyme amplification reaction (NEAR). In certain example embodiments, non-isothermal amplification methods may be used which include, but are not limited to, PCR, multiple displacement amplification (MDA), rolling circle amplification (RCA), ligase chain reaction (LCR), or ramification amplification method (RAM).

[0231] In certain example embodiments, the RNA or DNA amplification is NASBA, which is initiated with reverse transcription of target RNA by a sequence-specific reverse primer to create a RNA/DNA duplex. RNase H is then used to degrade the RNA template, allowing a forward primer containing a promoter, such as the T7 promoter, to bind and initiate elongation of the complementary strand, generating a double-stranded DNA product. The RNA polymerase promoter-mediated transcription of the DNA template then creates copies of the target RNA sequence. Importantly, each of the new target RNAs can be detected by the guide RNAs thus further enhancing the sensitivity of the assay. Binding of the target RNAs by the guide RNAs then leads to activation of the CRISPR effector protein and the methods proceed as outlined above. The NASBA reaction has the additional advantage of being able to proceed under moderate isothermal conditions, for example at approximately 41° C., making it suitable for systems and devices deployed for early and direct detection in the field and far from clinical laboratories.

[0232] In certain other example embodiments, a recombinase polymerase amplification (RPA) reaction may be used to amplify the target nucleic acids. RPA reactions employ recombinases which are capable of pairing sequence-specific primers with homologous sequence in duplex DNA. If target DNA is present, DNA amplification is initiated and no other sample manipulation such as thermal cycling or chemical melting is required. The entire RPA amplification system is stable as a dried formulation and can be transported safely without refrigeration. RPA reactions may also be carried out at isothermal temperatures with an optimum reaction temperature of 37-42° C. The sequence specific primers are designed to amplify a sequence comprising the target nucleic acid sequence to be detected. In certain example embodiments, a RNA polymerase promoter, such as a T7 promoter, is added to one of the primers. This results in an amplified double-stranded DNA product comprising the target sequence and a RNA polymerase promoter. After, or during, the RPA reaction, a RNA polymerase is added that will produce RNA from the double-stranded DNA templates. The amplified target RNA can then in turn be detected by the CRISPR effector system. In this way target DNA can be detected using the embodiments disclosed herein. RPA reactions can also be used to amplify target RNA. The target RNA is first converted to cDNA using a reverse transcriptase, followed by second strand DNA synthesis, at which point the RPA reaction proceeds as outlined above. In embodiments, the RPA reaction is an RT-RPA. In one embodiment, the RT used is an AMV RT.

[0233] An embodiment of the invention may comprise nickase-based amplification. The nicking enzyme may be a CRISPR protein. Accordingly, the introduction of nicks into dsDNA can be programmable and sequence-specific. FIG. 115 depicts an embodiment of the invention, which starts with two guides designed to target opposite strands of a dsDNA target. According to the invention, the nickase can be Cpf1, C2c1, Cas9 or any ortholog or CRISPR protein that cleaves or is engineered to cleave a single strand of a DNA duplex. The nicked strands may then be extended by a polymerase. In an embodiment, the locations of the nicks are selected such that extension of the strands by a polymerase is towards the central portion of the target duplex DNA between the nick sites. In certain embodiments, primers are included in the reaction capable of hybridizing to the extended strands followed by further polymerase extension of the primers to regenerate two dsDNA pieces: a first dsDNA that includes the first strand Cpf1 guide site or both the first and second strand Cpf1 guide sites, and a second dsDNA that includes the second strand Cpf1 guide site or both the first and second strand Cprf guide sites. These pieces continue to be nicked and extended in a cyclic reaction that exponentially amplifies the region of the target between nicking sites.

[0234] The amplification can be isothermal and selected for temperature. In one embodiment, the amplification proceeds rapidly at 37 degrees. In other embodiments, the temperature of the isothermal amplification may be chosen by selecting a polymerase (e.g. Bsu, Bst, Phi29, klenow fragment etc.).operable at a different temperature.

[0235] Thus, whereas nicking isothermal amplification techniques use nicking enzymes with fixed sequence preference (e.g. in nicking enzyme amplification reaction or NEAR), which requires denaturing of the original dsDNA target to allow annealing and extension of primers that add the nicking substrate to the ends of the target, use of a CRISPR nickase wherein the nicking sites can be programed via guide RNAs means that no denaturing step is necessary, enabling the entire reaction to be truly isothermal. This also simplifies the reaction because these primers that add the nicking substrate are different than the primers that are used later in the reaction, meaning that NEAR requires two primer sets (i.e. 4 primers) while Cpf1 nicking amplification only requires one primer set (i.e. two primers). This makes nicking Cpf1 amplification much simpler and easier to operate without complicated instrumentation to perform the denaturation and then cooling to the isothermal temperature.

[0236] Accordingly, in certain example embodiments the systems disclosed herein may include amplification reagents. Different components or reagents useful for amplification of nucleic acids are described herein. For example, an amplification reagent as described herein may include a buffer, such as a Tris buffer. A Tris buffer may be used at any concentration appropriate for the desired application or use, for example including, but not limited to, a concentration of 1 mM, 2 mM, 3 mM, 4 mM, 5 mM, 6 mM, 7 mM, 8 mM, 9 mM, 10 mM, 11 mM, 12 mM, 13 mM, 14 mM, 15 mM, 25 mM, 50 mM, 75 mM, 1 M, or the like. One of skill in the art will be able to determine an appropriate concentration of a buffer such as Tris for use with the present invention.

[0237] A salt, such as magnesium chloride (MgCl2), potassium chloride (KCl), or sodium chloride (NaCl), may be included in an amplification reaction, such as PCR, in order to improve the amplification of nucleic acid fragments. Although the salt concentration will depend on the particular reaction and application, in some embodiments, nucleic acid fragments of a particular size may produce optimum results at particular salt concentrations. Larger products may require altered salt concentrations, typically lower salt, in order to produce desired results, while amplification of smaller products may produce better results at higher salt concentrations. One of skill in the art will understand that the presence and/or concentration of a salt, along with alteration of salt concentrations, may alter the stringency of a biological or chemical reaction, and therefore any salt may be used that provides the appropriate conditions for a reaction of the present invention and as described herein.

[0238] Other components of a biological or chemical reaction may include a cell lysis component in order to break open or lyse a cell for analysis of the materials therein. A cell lysis component may include, but is not limited to, a detergent, a salt as described above, such as NaCl, KCl, ammonium sulfate [(NH4)2SO4], or others. Detergents that may be appropriate for the invention may include Triton X-100, sodium dodecyl sulfate (SDS), CHAPS (3-[(3-cholamidopropyl)dimethylammonio]-1-propanesulfonate), ethyl trimethyl ammonium bromide, nonyl phenoxypolyethoxylethanol (NP-40). Concentrations of detergents may depend on the particular application, and may be specific to the reaction in some cases. Amplification reactions may include dNTPs and nucleic acid primers used at any concentration appropriate for the invention, such as including, but not limited to, a concentration of 100 nM, 150 nM, 200 nM, 250 nM, 300 nM, 350 nM, 400 nM, 450 nM, 500 nM, 550 nM, 600 nM, 650 nM, 700 nM, 750 nM, 800 nM, 850 nM, 900 nM, 950 nM, 1 mM, 2 mM, 3 mM, 4 mM, 5 mM, 6 mM, 7 mM, 8 mM, 9 mM, 10 mM, 20 mM, 30 mM, 40 mM, 50 mM, 60 mM, 70 mM, 80 mM, 90 mM, 100 mM, 150 mM, 200 mM, 250 mM, 300 mM, 350 mM, 400 mM, 450 mM, 500 mM, or the like. Likewise, a polymerase useful in accordance with the invention may be any specific or general polymerase known in the art and useful or the invention, including Taq polymerase, Q5 polymerase, or the like.

[0239] In some embodiments, amplification reagents as described herein may be appropriate for use in hot-start amplification. Hot start amplification may be beneficial in some embodiments to reduce or eliminate dimerization of adaptor molecules or oligos, or to otherwise prevent unwanted amplification products or artifacts and obtain optimum amplification of the desired product. Many components described herein for use in amplification may also be used in hot-start amplification. In some embodiments, reagents or components appropriate for use with hot-start amplification may be used in place of one or more of the composition components as appropriate. For example, a polymerase or other reagent may be used that exhibits a desired activity at a particular temperature or other reaction condition. In some embodiments, reagents may be used that are designed or optimized for use in hot-start amplification, for example, a polymerase may be activated after transposition or after reaching a particular temperature. Such polymerases may be antibody-based or aptamer-based. Polymerases as described herein are known in the art. Examples of such reagents may include, but are not limited to, hot-start polymerases, hot-start dNTPs, and photo-caged dNTPs. Such reagents are known and available in the art. One of skill in the art will be able to determine the optimum temperatures as appropriate for individual reagents.

[0240] Amplification of nucleic acids may be performed using specific thermal cycle machinery or equipment, and may be performed in single reactions or in bulk, such that any desired number of reactions may be performed simultaneously. In some embodiments, amplification may be performed using microfluidic or robotic devices, or may be performed using manual alteration in temperatures to achieve the desired amplification. In some embodiments, optimization may be performed to obtain the optimum reactions conditions for the particular application or materials. One of skill in the art will understand and be able to optimize reaction conditions to obtain sufficient amplification.

[0241] In certain embodiments, detection of DNA with the methods or systems of the invention requires transcription of the (amplified) DNA into RNA prior to detection.

[0242] It will be evident that detection methods of the invention can involve nucleic acid amplification and detection procedures in various combinations. The nucleic acid to be detected can be any naturally occurring or synthetic nucleic acid, including but not limited to DNA and RNA, which may be amplified by any suitable method to provide an intermediate product that can be detected. Detection of the intermediate product can be by any suitable method including but not limited to binding and activation of a CRISPR protein which produces a detectable signal moiety by direct or collateral activity.

[0243] Helicase-Dependent Amplification

[0244] In helicase-dependent amplification, a helicase enzyme is used to unwind a double stranded nucleic acid to generate templates for primer hybridization and subsequent primer-extension. This process utilizes two oligonucleotide primers, each hybridizing to the 3′-end of either the sense strand containing the target sequence or the anti-sense strand containing the reverse-complementary target sequence. The HDA reaction is a general method for helicase-dependent nucleic acid amplification.

[0245] In combining this method with a CRISPR-SHERLOCK system, the target nucleic acid may be amplified by opening R-loops of the target nucleic acid using first and second CRISPR/Cas complexes. The first and second strand of the target nucleic acid may thus be unwound using a helicase, allowing primers and polymerase to bind and extend the DNA under isothermal conditions.

[0246] The term “helicase” refers here to any enzyme capable of unwinding a double stranded nucleic acid enzymatically. For example, helicases are enzymes that are found in all organisms and in all processes that involve nucleic acid such as replication, recombination, repair, transcription, translation and RNA splicing. (Kornberg and Baker, DNA Replication, W. H. Freeman and Company (2^{nd} ed. (1992)), especially chapter 11). Any helicase that translocates along DNA or RNA in a 5′ to 3′ direction or in the opposite 3′ to 5′ direction may be used in present embodiments of the invention. This includes helicases obtained from prokaryotes, viruses, archaea, and eukaryotes or recombinant forms of naturally occurring enzymes as well as analogues or derivatives having the specified activity. Examples of naturally occurring DNA helicases, described by Kornberg and Baker in chapter 11 of their book, DNA Replication, W. H. Freeman and Company (2^{nd} ed. (1992)), include E. coli helicase I, II, III, & IV, Rep, DnaB, PriA, PcrA, T4 Gp4lhelicase, T4 Dda helicase, T7 Gp4 helicases, SV40 Large T antigen, yeast RAD. Additional helicases that may be useful in HDA include RecQ helicase (Harmon and Kowalczykowski, J. Biol. Chem. 276:232-243 (2001)), thermostable UvrD helicases from T. tengcongensis (disclosed in this invention, Example XII) and T. thermophilus (Collins and McCarthy, Extremophiles. 7:35-41. (2003)), thermostable DnaB helicase from T. aquaticus (Kaplan and Steitz, J. Biol. Chem. 274:6889-6897 (1999)), and MCM helicase from archaeal and eukaryotic organisms ((Grainge et al., Nucleic Acids Res. 31:4888-4898 (2003)).

[0247] A traditional definition of a helicase is an enzyme that catalyzes the reaction of separating/unzipping/unwinding the helical structure of nucleic acid duplexes (DNA, RNA or hybrids) into single-stranded components, using nucleoside triphosphate (NTP) hydrolysis as the energy source (such as ATP). However, it should be noted that not all helicases fit this definition anymore. A more general definition is that they are motor proteins that move along the single-stranded or double stranded nucleic acids (usually in a certain direction, 3′ to 5′ or 5 to 3, or both), i.e. translocases, that can or cannot unwind the duplexed nucleic acid encountered. In addition, some helicases simply bind and “melt” the duplexed nucleic acid structure without an apparent translocase activity.

[0248] Helicases exist in all living organisms and function in all aspects of nucleic acid metabolism. Helicases are classified based on the amino acid sequences, directionality, oligomerization state and nucleic-acid type and structure preferences. The most common classification method was developed based on the presence of certain amino acid sequences, called motifs. According to this classification helicases are divided into 6 super families: SF1, SF2, SF3, SF4, SF5 and SF6. SF1 and SF2 helicases do not form a ring structure around the nucleic acid, whereas SF3 to SF6 do. Superfamily classification is not dependent on the classical taxonomy.

[0249] DNA helicases are responsible for catalyzing the unwinding of double-stranded DNA (dsDNA) molecules to their respective single-stranded nucleic acid (ssDNA) forms. Although structural and biochemical studies have shown how various helicases can translocate on ssDNA directionally, consuming one ATP per nucleotide, the mechanism of nucleic acid unwinding and how the unwinding activity is regulated remains unclear and controversial (T. M. Lohman, E. J. Tomko, C. G. Wu, “Non-hexameric DNA helicases and translocases: mechanisms and regulation,” Nat Rev Mol Cell Biol 9:391-401 (2008)). Since helicases can potentially unwind all nucleic acids encountered, understanding how their unwinding activities are regulated can lead to harnessing helicase functions for biotechnology applications.

[0250] The term “HDA” refers to Helicase Dependent Amplification, which is an in vitro method for amplifying nucleic acids by using a helicase preparation for unwinding a double stranded nucleic acid to generate templates for primer hybridization and subsequent primer-extension. This process utilizes two oligonucleotide primers, each hybridizing to the 3′-end of either the sense strand containing the target sequence or the anti-sense strand containing the reverse-complementary target sequence. The HDA reaction is a general method for helicase-dependent nucleic acid amplification.

[0251] The invention comprises use of any suitable helicase known in the art. These include, but are not necessarily limited to, UvrD helicase, CRISPR-Cas3 helicase, E. coli helicase I, E. coli helicase II, E. coli helicase III, E. coli helicase IV, Rep helicase, DnaB helicase, PriA helicase, PcrA helicase, T4 Gp41 helicase, T4 Dda helicase, SV40 Large T antigen, yeast RAD helicase, RecD helicase, RecQ helicase, thermostable T. tengcongensis UvrD helicase, thermostable T. thermophilus UvrD helicase, thermostable T. aquaticus DnaB helicase, Dda helicase, papilloma virus E1 helicase, archaeal MCM helicase, eukaryotic MCM helicase, and T7 Gp4 helicase.

[0252] In particularly preferred embodiments, the helicase comprises a super mutation. In particular embodiments, although the E. coli mutation has been described, the mutations were generated by sequence alignment (e.g. D409A/D410A for TteUvrd) and result in thermophilic enzymes working at lower temperatures, such as 37° C., which is advantageous for amplification methods and systems described herein. In some embodiments, the super mutations is an aspartate to alanine mutation, with position based on sequence alignment. In some embodiments, the super mutant helicase is selected from WP_003870487.1 Thermoanaerobacter ethanolicus 403/404, WP_049660019.1 Bacillus sp. FJAT-27231 407/408, WP_034654680.1 Bacillus megaterium 415/416, WP_095390358.1 Bacillus simplex 407/408, and WP_055343022.1 Paeniclostridium sordellii 402/403.

[0253] An “individual discrete volume” is a discrete volume or discrete space, such as a container, receptacle, or other defined volume or space that can be defined by properties that prevent and/or inhibit migration of nucleic acids and reagents necessary to carry out the methods disclosed herein, for example a volume or space defined by physical properties such as walls, for example the walls of a well, tube, or a surface of a droplet, which may be impermeable or semipermeable, or as defined by other means such as chemical, diffusion rate limited, electro-magnetic, or light illumination, or any combination thereof. By “diffusion rate limited” (for example diffusion defined volumes) is meant spaces that are only accessible to certain molecules or reactions because diffusion constraints effectively defining a space or volume as would be the case for two parallel laminar streams where diffusion will limit the migration of a target molecule from one stream to the other. By “chemical” defined volume or space is meant spaces where only certain target molecules can exist because of their chemical or molecular properties, such as size, where for example gel beads may exclude certain species from entering the beads but not others, such as by surface charge, matrix size or other physical property of the bead that can allow selection of species that may enter the interior of the bead. By “electro-magnetically” defined volume or space is meant spaces where the electro-magnetic properties of the target molecules or their supports such as charge or magnetic properties can be used to define certain regions in a space such as capturing magnetic particles within a magnetic field or directly on magnets. By “optically” defined volume is meant any region of space that may be defined by illuminating it with visible, ultraviolet, infrared, or other wavelengths of light such that only target molecules within the defined space or volume may be labeled. One advantage to the used of non-walled, or semipermeable is that some reagents, such as buffers, chemical activators, or other agents maybe passed in Applicants' through the discrete volume, while other material, such as target molecules, maybe maintained in the discrete volume or space. Typically, a discrete volume will include a fluid medium, (for example, an aqueous solution, an oil, a buffer, and/or a media capable of supporting cell growth) suitable for labeling of the target molecule with the indexable nucleic acid identifier under conditions that permit labeling. Exemplary discrete volumes or spaces useful in the disclosed methods include droplets (for example, microfluidic droplets and/or emulsion droplets), hydrogel beads or other polymer structures (for example poly-ethylene glycol di-acrylate beads or agarose beads), tissue slides (for example, fixed formalin paraffin embedded tissue slides with particular regions, volumes, or spaces defined by chemical, optical, or physical means), microscope slides with regions defined by depositing reagents in ordered arrays or random patterns, tubes (such as, centrifuge tubes, microcentrifuge tubes, test tubes, cuvettes, conical tubes, and the like), bottles (such as glass bottles, plastic bottles, ceramic bottles, Erlenmeyer flasks, scintillation vials and the like), wells (such as wells in a plate), plates, pipettes, or pipette tips among others. In certain example embodiments, the individual discrete volumes are the wells of a microplate. In certain example embodiments, the microplate is a 96 well, a 384 well, or a 1536 well microplate.

### Incubating

[0254] Methods of detection and or quantifying using the systems disclosed herein can comprise incubating the sample or set of samples under conditions sufficient to allow binding of the guide RNAs to one or more target molecules. In certain example embodiments, the incubation time of the present invention may be shortened. The assay may be performed in a period of time required for an enzymatic reaction to occur. One skilled in the art can perform biochemical reactions in 5 minutes (e.g., 5 minute ligation). Incubating may occur at one or more temperatures over timeframes between about 10 minutes and 3 hours, preferably less than 200 minutes, 150 minutes, 100 minutes, 75 minutes, 60 minutes, 45 minutes, 30 minutes, or 20 minutes, depending on sample, reagents and components of the system. In some embodiments, incubating is performed at one or more temperatures between about 20° C. and 80° C., in some embodiments, about 37° C.

### Activating

[0255] Activating of the CRISPR effector protein occurs via binding of the guide RNAs to the one or more target molecules, wherein activating the CRISPR effector protein results in modification of the detection construct such that a detectable positive signal is generated.

### Detecting a Signal

[0256] Detecting may comprise visual observance of a positive signal relative to a control. Detecting may comprise a loss of signal or presence of signal at one or more capture regions, for example colorimetric detection, or fluorescent detection. In certain example embodiments, further modifications may be introduced that further amplify the detectable positive signal. For example, activated CRISPR effector protein collateral activation may be used to generate a secondary target or additional guide sequence, or both. In one example embodiment, the reaction solution would contain a secondary target that is spiked in at high concentration. The secondary target may be distinct from the primary target (i.e. the target for which the assay is designed to detect) and in certain instances may be common across all reaction volumes. A secondary guide sequence for the secondary target may be protected, e.g. by a secondary structural feature such as a hairpin with an RNA loop, and unable to bind the second target or the CRISPR effector protein. Cleavage of the protecting group by an activated CRISPR effector protein (i.e. after activation by formation of complex with the primary target(s) in solution) and formation of a complex with free CRISPR effector protein in solution and activation from the spiked in secondary target. In certain other example embodiments, a similar concept is used with free guide sequence to a secondary target and protected secondary target. Cleavage of a protecting group off the secondary target would allow additional CRISPR effector protein, guide sequence, secondary target sequence to form. In yet another example embodiment, activation of CRISPR effector protein by the primary target(s) may be used to cleave a protected or circularized primer, which would then be released to perform an isothermal amplification reaction, such as those disclosed herein, on a template for either secondary guide sequence, secondary target, or both. Subsequent transcription of this amplified template would produce more secondary guide sequence and/or secondary target sequence, followed by additional CRISPR effector protein collateral activation.

### Quantifying

[0257] In particular methods, comparing the intensity of the one or more signals to a control is performed to quantify the nucleic acid in the sample. The term “control” refers to any reference standard suitable to provide a comparison to the expression products in the test sample. In one embodiment, the control comprises obtaining a “control sample” from which expression product levels are detected and compared to the expression product levels from the test sample. Such a control sample may comprise any suitable sample, including but not limited to a sample from a control patient (can be stored sample or previous sample measurement) with a known outcome; normal tissue, fluid, or cells isolated from a subject, such as a normal patient or the patient having a condition of interest.

[0258] The intensity of a signal is “significantly” higher or lower than the normal intensity if the signal is greater or less, respectively, than the normal or control level by an amount greater than the standard error of the assay employed to assess amount, and preferably at least 20%, 30%, 40%, 50%, 60%, 70%, 80%, 90%, 100%, 150%, 200%, 300%, 350%, 400%, 500%, 600%, 700%, 800%, 900%, 1000% or than that amount. Alternatively, the signal can be considered “significantly” higher or lower than the normal and/or control signal if the amount is at least about two, and preferably at least about 5%, 10%, 15%, 20%, 25%, 30%, 35%, 40%, 45%, 50%, 55%, 60%, 65%, 70%, 75%, 80%, 85%, 90%, 95%, 100%, 105%, 110%, 115%, 120%, 125%, 130%, 135%, 140%, 145%, 150%, 155%, 160%, 165%, 170%, 175%, 180%, 185%, 190%, 195%, two times, three times, four times, five times, or more, or any range in between, such as 5%-100%, higher or lower, respectively, than the normal and/or control signal. Such significant modulation values can be applied to any metric described herein, such as altered level of expression, altered activity, changes in biomarker inhibition, changes in test agent binding, and the like.

[0259] In some embodiments, the detectable positive signal may be a loss of fluorescent signal relative to a control, as described herein. In some embodiments, the detectable positive signal may be detected on a lateral flow device, as described herein.

### Applications of Detection Methods

[0260] In certain example embodiments, the systems, devices, and methods, disclosed herein are directed to detecting the presence of one or more microbial agents in a sample, such as a biological sample obtained from a subject. In certain example embodiments, the microbe may be a bacterium, a fungus, a yeast, a protozoan, a parasite, or a virus. Accordingly, the methods disclosed herein can be adapted for use in other methods (or in combination) with other methods that require quick identification of microbe species, monitoring the presence of microbial proteins (antigens), antibodies, antibody genes, detection of certain phenotypes (e.g. bacterial resistance), monitoring of disease progression and/or outbreak, and antibiotic screening. Because of the rapid and sensitive diagnostic capabilities of the embodiments disclosed here, detection of microbe species type, down to a single nucleotide difference, and the ability to be deployed as a POC device, the embodiments disclosed herein may be used as guide therapeutic regimens, such as a selection of the appropriate antibiotic or antiviral. The embodiments disclosed herein may also be used to screen environmental samples (air, water, surfaces, food etc.) for the presence of microbial contamination.

[0261] Disclosed is a method to identify microbial species, such as bacterial, viral, fungal, yeast, or parasitic species, or the like. Particular embodiments disclosed herein describe methods and systems that will identify and distinguish microbial species within a single sample, or across multiple samples, allowing for recognition of many different microbes. The present methods allow the detection of pathogens and distinguishing between two or more species of one or more organisms, e.g., bacteria, viruses, yeast, protozoa, and fungi or a combination thereof, in a biological or environmental sample, by detecting the presence of a target nucleic acid sequence in the sample. A positive signal obtained from the sample indicates the presence of the microbe. Multiple microbes can be identified simultaneously using the methods and systems of the invention, by employing the use of more than one effector protein, wherein each effector protein targets a specific microbial target sequence. In this way, a multi-level analysis can be performed for a particular subject in which any number of microbes can be detected at once. In some embodiments, simultaneous detection of multiple microbes may be performed using a set of probes that can identify one or more microbial species.

[0262] The systems and methods of detection can be used to identify single nucleotide variants, detection based on rRNA sequences, screening for drug resistance, monitoring microbe outbreaks, genetic perturbations, and screening of environmental samples, as described in International Patent Application No. PCT/US2018/054472 filed Oct. 22, 2018 at [0183]-[0327], incorporated herein by reference.

[0263] In certain example embodiments, the systems, devices, and methods disclosed herein may be used for biomarker detection. For example, the systems, devices and method disclosed herein may be used for SNP detection and/or genotyping. The systems, devices and methods disclosed herein may be also used for the detection of any disease state or disorder characterized by aberrant gene expression. Aberrant gene expression includes aberration in the gene expressed, location of expression and level of expression. Multiple transcripts or protein markers related to cardiovascular, immune disorders, and cancer among other diseases may be detected. In certain example embodiments, the embodiments disclosed herein may be used for cell free DNA detection of diseases that involve lysis, such as liver fibrosis and restrictive/obstructive lung disease. In certain example embodiments, the embodiments could be utilized for faster and more portable detection for pre-natal testing of cell-free DNA. The embodiments disclosed herein may be used for screening panels of different SNPs associated with, among others, cardiovascular health, lipid/metabolic signatures, ethnicity identification, paternity matching, human ID (e.g. matching suspect to a criminal database of SNP signatures). The embodiments disclosed herein may also be used for cell free DNA detection of mutations related to and released from cancer tumors. The embodiments disclosed herein may also be used for detection of meat quality, for example, by providing rapid detection of different animal sources in a given meat product. Embodiments disclosed herein may also be used for the detection of GMOs or gene editing related to DNA. As described herein elsewhere, closely related genotypes/alleles or biomarkers (e.g. having only a single nucleotide difference in a given target sequence) may be distinguished by introduction of a synthetic mismatch in the gRNA.

[0264] In an aspect, the invention relates to a method for detecting target nucleic acids in samples, comprising:

[0265] distributing a sample or set of samples into one or more individual discrete volumes, the individual discrete volumes comprising a CRISPR system according to the invention as described herein;

[0266] incubating the sample or set of samples under conditions sufficient to allow binding of the one or more guide RNAs to one or more target molecules;

[0267] activating the CRISPR effector protein via binding of the one or more guide RNAs to the one or more target molecules, wherein activating the CRISPR effector protein results in modification of the RNA-based masking construct such that a detectable positive signal is generated; and

[0268] detecting the detectable positive signal, wherein detection of the detectable positive signal indicates a presence of one or more target molecules in the sample.

[0269] The sensitivity of the assays described herein are well suited for detection of target nucleic acids in a wide variety of biological sample types, including sample types in which the target nucleic acid is dilute or for which sample material is limited. Biomarker screening may be carried out on a number of sample types including, but not limited to, saliva, urine, blood, feces, sputum, and cerebrospinal fluid. In certain embodiments, the sample is from bone marrow or peripheral blood. The embodiments disclosed herein may also be used to detect up- and/or down-regulation of genes. For example, a sample may be serially diluted such that only over-expressed genes remain above the detection limit threshold of the assay.

[0270] In certain embodiments, the present invention provides steps of obtaining a sample of biological fluid (e.g., urine, blood plasma or serum, sputum, cerebral spinal fluid), and extracting the DNA. The mutant nucleotide sequence to be detected, may be a fraction of a larger molecule or can be present initially as a discrete molecule.

[0271] In certain embodiments, DNA is isolated from plasma/serum of a cancer patient. For comparison, DNA samples isolated from neoplastic tissue and a second sample may be isolated from non-neoplastic tissue from the same patient (control), for example, lymphocytes. The non-neoplastic tissue can be of the same type as the neoplastic tissue or from a different organ source. In certain embodiments, blood samples are collected and plasma immediately separated from the blood cells by centrifugation. Serum may be filtered and stored frozen until DNA extraction.

[0272] In embodiments, the sample can be a cryopreserved or a fresh sample. Steps of pelleting and extracting can be performed on cryopreserved or fresh samples. In embodiments, cells from a sample are washed and pelleted. In embodiments, lysis buffer can be used, with or without PBS washes prior to pelleting, in particular embodiments, the sample treated with lysis buffer is a fresh sample. Extraction of RNA can be performed in pelleted samples using commercially available kits, for example, the Qiagen RNeasy Kit.

[0273] In certain example embodiments, target nucleic acids are detected directly from a crude or unprocessed sample, such as blood, serum, saliva, cerebrospinal fluid, sputum, or urine. In certain example embodiments, the target nucleic acid is cell free DNA.

### EXAMPLES

### Example 1—Guide Design

[0274] Previous tiling of SHERLOCK guides along targets has demonstrated significant variation in collateral activity between guide RNAs with LwaCas13a and CcaCas13b¹, which has an effect on the overall kinetics and sensitivity of the assay. Although a sequence constraint known as a protospacer flanking site (PFS) exists for Cas13 targeting^{3,6}, many guide RNAs without the correct PFS retain activity. Applicants therefore hypothesized that some combination of the PFS and other sequence and guide features might be driving the efficacy of Cas13 detection. Applicants applied a machine learning approach to train a logistic regression model on the collateral activity of hundreds of guides, using a combination of guide sequence, flanking target sequence, guide position, and guide GC content as input features (FIG. 1a). Applicants designed a panel of 410 crRNAs for LwaCas13a and 476 crRNAs for CcaCas13b across five different ssRNA targets: Ebola, Zika, the thermonuclease transcript from S. aureus, Dengue, and a synthetic ssRNA target (ssRNA 1). Using in vitro transcription to express these guides, Applicants evaluated the resulting collateral activity of LwaCas13a and CcaCas13b by fluorescent reporter assays and found significant variation between the crRNAs (FIG. 1b and FIG. 7a).

[0275] Given the wide variance of guide efficiencies for both LwaCas13a and CcaCas13b, Applicants designed a machine learning model that would select for the “best” performing guides for each enzyme as follows. As a majority of LwaCas13a guides had activity above background (FIG. 1b, FIG. 7a), Applicants selected, on a per-target basis, guides with 2-fold activity over the median activity as “best” performing guides. By contrast, a majority of CcaCas13b guides were near background, (FIG. 1b, FIG. 7a), so “best” performing guides were classified as the top quintile for each target tested. For each ortholog, a logistic regression model was trained to distinguish best performing guides from all other guides, based on the input features. The length of the flanking target region was considered as a free parameter and selected during cross-validation by maximizing the area under the curve (AUC) of the receiver operator characteristic (ROC) for each machine learning model. The data was split into train/test/validation sets and the training and test sets were used for training the logistic model with three-fold cross validation and a hyperparameter search. This training process resulted in models with AUC of 0.84 and 0.89 for LwaCas13a and CcaCas13b, respectively (FIG. 1c). Examination of the full feature set for the machine learning model (FIG. 7b, 7c) revealed strong weights for both orthologs in the guide sequence and flanking regions. One of the key features that stood out were weights that recapitulated the known PFS preferences of the enzymes (3′ H for LwaCas13a and 5′-D/3 NAA for CcaCas3b) (FIG. 1d)^{3,6}, providing biological validation to the machine learning model. To make the design tool easily accessible and usable by the community, Applicants provide a simple web tool (sherlock.genome-engineering.org) for LwaCas13a and CcaCas13b guide design.

### Example 2—Guide Validation

[0276] To further validate the machine learning models beyond the cross-validation, Applicants designed a panel of new crRNAs using the machine learning model targeting either the thermonuclease transcript or two additional transcripts from the long and short isoforms of the PML/RARA fusion associated with acute promyelocytic leukemia (APML). Applicants found that both the LwaCas13a and CcaCas13b models succeeded at predicting guide RNA activity (LwaCas13a model validation has R values of 0.79, 0.54, and 0.41; CcaCas13b model validation has R values of 0.44, 0.69, and 0.89) (FIG. 2a, FIG. 8a). Additionally, the best and worst predicted crRNAs display drastically different kinetics and sensitivity (FIG. 2b, FIG. 8b). Although the improvement in kinetics for best predicted crRNAs is relevant for increasing the speed of all SHERLOCK assays, the signal increase is especially relevant for portable versions of the test, as color generation on the lateral flow strips is sensitive to the overall collateral activity levels. While the guide model was trained for maximizing overall signal generation, the increase in kinetics was an added benefit that was not explicitly trained for in the machine learning model development. Applicants evaluated the best and worst predicted crRNAs for the thermonuclease, short APML, and long APML targets on lateral flow strips and found that only the best predicted crRNAs generated a functional test suitable for portable detection (FIG. 2c, FIG. 8c). Moreover, Applicants also validated the LwaCas13a prediction model for in vivo transcript knockdown by targeting the Gaussia luciferase (Gluc) transcript in HEK293FT cells and evaluating previously published LwaCas13a mammalian RNA knockdown data of reporter and endogenous transcripts (FIG. 2d)¹⁴. Applicants found that guides predicted to have strong activity were significantly more effective at knockdown of Gluc and KRAS (FIG. 2e) and that Gluc guides with predicted good performance outperformed guides either with poor predicted performance or selected randomly (FIG. 9).

### Example 3—One-Pot Assay

[0277] Previous versions of the SHERLOCK assay have been a two-step format with an initial recombinase polymerase amplification (RPA)¹⁹ followed by T7 transcription and Cas13 detection. To simplify the SHERLOCK assay, Applicants focused on optimizing a one-pot amplification and detection protocol by combining both steps into a single reaction with the best predicted crRNAs. Applicants designed a one-pot SHERLOCK assay for a synthetic acyltransferase transcript derived from Pseudomonas aeruginosa, a significant human pathogen that requires rapid diagnosis. Applicants found that the best predicted crRNA for LwaCas13a allowed for fast and highly-sensitive (20 aM) detection of acyltransferase in a one-pot reaction format compared to the worst predicted crRNA (FIG. 3a-d). Additionally, the best predicted crRNA enabled an acyltransferase lateral flow assay with sensitivity down to 20 aM (FIG. 3e, 3f). Similarly, for CcaCas13b, Applicants used the guide prediction machine learning model to generate a one-pot SHERLOCK assay for detection of the thermonuclease transcript (FIG. 3g). As with LwaCas13a, Applicants found that CcaCas13b could achieve fast and sensitive detection down to 3 aM by fluorescence (FIG. 3h-j) and 20 aM by portable lateral flow (FIG. 3k, 3l). The optimized one-pot format was readily extendable to additional targets, including the Ea175 and Ea81 transcripts from Treponema denticola, a gram-negative bacteria that can cause severe periodontal disease, and could be adapted for sensitive lateral flow tests (FIG. 10A-10F).

[0278] To achieve even higher sensitivity with one-pot assays, Applicants explored alternative amplification strategies, which could provide less bias and result in a more quantitative assay. Helicase displacement amplification (HDA)²⁰ relies on helicases to separate the DNA duplex and allow for primer invasion and amplification, usually at high temperatures like 65° C. To enable rapid HDA, Applicants profiled a set of UvrD helicase orthologs with engineered mutations²¹ with a helicase reporter assay (FIG. 11a, 11b)²² and found several candidates with strong helicase activity at 37° C., including Super UvrD from Thermoanaerobacter tengcongensis (TteUvrD), which allowed for 37° C. isothermal amplification and compatibility with Cas13-based collateral detection. Applicants combined Super TteUvrD with polymerases, single-stranded binding proteins, and LwaCas13a to create a one-pot super HDA SHERLOCK reaction, which was capable of single molecule detection of the Ea175 target at 100 minutes and was highly quantitative (FIG. 11c-11e).

### Example 4—Multiplexing

[0279] Applicants further expanded the one-pot RPA SHERLOCK assay to allow for multiplexing of multiple targets (FIG. 4a). Applicants first tested whether one-pot SHERLOCK could simultaneously detect two targets, Ea175 and thermonuclease, using LwaCas13a and CcaCas13b, respectively. By detecting the collateral activity of each enzyme in separate fluorescent channels, FAM and HEX, Applicants were able to achieve 2 aM detection of each target (FIG. 4b). Next, Applicants adapted the lateral flow format to allow for detection of two targets. As the previous lateral flow design relied on general capture of antibody that was not bound by intact reporter RNAs¹, it is not suitable for detecting two targets. Instead, Applicants adapted a lateral flow approach with two separate detection lines consisting of either deposited streptavidin or anti-DIG antibodies. These lines capture reporter RNA decorated with a fluorophore and either Biotin or DIG, allowing fluorescent visualization of signal loss at detection lines due to collateral activity and cleavage of corresponding reporter RNA. Applicants evaluated this lateral flow design using a two-step SHERLOCK format for detection of lectin DNA and a synthetic DNA target (ssDNA 1) (FIG. 12a), and found that Applicants could detect down to 2 aM of each target (FIG. 12b, 12c). Applicants then applied the one-pot multiplexed SHERLOCK assay for thermonuclease and Ea175 to the new lateral flow format (FIG. 4c) and found that Applicants could detect down to 20 aM of each target successfully (FIG. 4d,e). As this lateral flow design can be extended further by depositing any molecule that is part of an orthogonal hybridization pair, Applicants developed lateral flow strips capable of detecting three targets simultaneously by striping the anti-Alexa 488 antibody to capture Alexa 488 on a reporter DNA (FIG. 12d). By augmenting the lateral flow assay with Cas12a from Acidaminococcus sp. BV3L6 (AsCas12a), Applicants were able to independently assay a third target in an additional cleavage channel sensing DNA collateral activity¹. This design was capable of independently assaying three targets, Zika ssRNA, Dengue ssRNA, and ssDNA1 simultaneously (FIG. 12e, 12f).

### Example 5—Optimized Clinical Detection

[0280] Lastly, Applicants sought to apply SHERLOCK detection to a clinical setting, where using the best crRNA for a given target is essential for fast and sensitive performance. Acute promyelocytic leukemia (APML) and acute lymphocytic leukemia (ALL) cancers are caused by chromosomal fusions in the transcribed mRNA, and distinguishing these rapidly is critical for effective treatment and prognosis²³. To design robust clinical-grade SHERLOCK assays, Applicants employed the Cas13 guide design tool to predict top guides for three fusion transcripts characteristic of APML and ALL cancers: PML-RARa Intron/exon 6 fusion, PML-RARa Intron 3 fusion, and BCR-ABL p210 b3a2 fusion²³ (FIG. 5a). The developed SHERLOCK assay for these three targets (FIGS. 13A-13D) was used to predict APML or ALL presence across a blinded set of 17 patient bone marrow samples, as well as 2 known samples (samples 12 and 15 in FIG. 5). Cas13 detection using the best predicted guide achieved clear fluorescence detection in 45 minutes or less for all samples verified by RT-PCR (FIG. 5b,c,d, FIG. 14A-14E). Detection with a lateral flow readout also yielded clear identification of the RNA fusion present in every sample (FIG. 5e, FIG. 15). Lastly, Applicants showed that the multiplexed lateral flow test could be deployed to simultaneously test for multiple fusion transcripts (FIG. 6), enabling a simple, rapid, and portable test that can detect several cancer fusion transcripts simultaneously.

### Discussion

[0281] The SHERLOCK platform is a low-cost CRISPR-based diagnostic that enables single-molecule detection of DNA or RNA with single-nucleotide specificity^{1,2,10}. Nucleic acid detection with SHERLOCK relies on the collateral activity of Cas13 and Cas12 to promiscuously cleave reporters upon target recognition^{3,4,7}. SHERLOCK is capable of single-molecule detection in less than an hour and can be used for multiplexed target detection when using CRISPR enzymes with orthogonal cleavage preference, such as Cas13a from Leptotrichia wadei (LwaCas13a), Cas13b from Capnocytophaga canimorsus Cc5 (CcaCas13b), and Cas12a from Acidaminococcus sp. BV3L6 (AsCas12a)^{1,2,9-12}. These enzymes have also been used for other applications both in vivo and in vitro^{1,2,9-16}, and predictive Cas13 guide design tools would be broadly beneficial in the design of Cas13-based experiments or assays, such as knockdown of transcripts by Cas13 in mammalian cells. In particular, an accurate model for activity-based Cas13 guide selection would facilitate design of optimal SHERLOCK assays, especially in applications requiring high-activity guides like lateral flow detection.

[0282] Previously, software for the design and prediction of Cas9 guides for activity and off-target minimization have been developed using machine learning approaches 17,18, broadening the use the use of the technology. Applicants therefore worked to develop a similar tool for Cas13 by using a machine learning approach.

[0283] Together, these results herein demonstrate that SHERLOCK assays can be reliably designed with high sensitivity and fast kinetics using a machine learning approach, accessible at sherlock.genome-engineering.org. This guide design tool has broad applicability for both in vitro and in vivo RNA targeting applications and can be readily extended to include other useful Cas13 and Cas12 orthologs with collateral activity, including Cas13d^{13,24}, Cas12a^{8,9,11}, Cas12b^{5,12}, and many other Cas12/Cas13 family members^{7,25}. Using the design tool, Applicants generated highly sensitive assays suitable for portable lateral flow detection of one or two targets using LwaCas13a and CcaCas13b, which can be performed in a single step, reducing pipetting steps and eliminating potential contamination of post-amplification samples. Additionally, by utilizing DNA collateral detection with AsCas12a, Applicants can perform multiplexing of three targets in a lateral flow format. With these improvements, SHERLOCK can now achieve multiplexing of up to four targets simultaneously by fluorescence¹ and three targets by lateral flow. Applicants also apply helicase engineering to develop a new CRISPR-detection compatible amplification method, super HDA, and demonstrate the quantitative nature of super HDA SHERLOCK. Finally, Applicants demonstrate the facile applicability of the guide design model to develop a clinically relevant test for APML and ALL cancers with high sensitivity and performance in a portable lateral flow format. The advances here increase the accessibility of the SHERLOCK platform, deploying it as a simple, portable nucleic acid diagnostic with broad clinical utility and provide a user-friendly web tool for Cas13 guide design for both in vivo RNA targeting and SHERLOCK assays.

### Methods

### Protein Expression and Purification of Cas13

[0284] Expression and purification of LwaCas13a and CcaCas13b was performed as previously described^{1,2}. In brief, Applicants transformed bacterial expression vectors into Rosetta™ 2(DE3)pLysS Singles Competent Cells (Millipore) and scaled up bacterial growth in 4 L of Terrific Broth 4 growth media (TB). Cell pellets were lysed by high-pressure cell disruption using the LM20 Microfluidizer system at 27,000 PSI and freed protein was bound via StrepTactin Sepharose (GE) resin. After washing, protein was released from the resin via SUMO protease digestion overnight and protein was subsequently purified by cation exchange chromatography and then gel filtration purification using an AKTA PURE FPLC (GE Healthcare Life Sciences). Eluted protein was then concentrated into Storage Buffer (600 mM NaCl, 50 mM Tris-HCl pH 7.5, 5% glycerol, 2 mM DTT) and frozen at −80° C. for storage.

Nucleic Acid Target and crRNA Preparation

[0285] Nucleic acid targets and crRNAs were prepared as previously described^{1,2}. Briefly, targets were either used as ssDNA or PCR amplified with NEBNext PCR master mix, gel extracted, and purified using MinElute gel extraction kits (Qiagen). For RNA detection reactions, RNA was prepared by using either ssDNA targets with double-stranded T7-promoter regions or fully double-stranded PCR products in T7 RNA synthesis reactions at 30° C. using the HiScribe T7 Quick High Yield RNA Synthesis Kit (New England Biolabs). RNA was then purified using MEGAclear Transcription Clean-up kit (Thermo Fisher).

[0286] crRNAs were synthesized by using ultramer ssDNA substrates (IDT) that were double stranded in the T7 promoter region through an annealed primer. Synthesized crRNAs were prepared using these templates in T7 expression assays at 37C using the HiScribe T7 Quick High Yield RNA Synthesis kit (NEB). RNAs were then purified using RNAXP clean beads (Beckman Coulter) at 2× ratio of beads to reaction volume, with an additional 1.8× supplementation of isopropanol (Sigma).

[0287] All crRNA and target sequences are listed in Tables 1 and 2, respectively.

### Fluorescent Cleavage Assay

[0288] Cas13 detection assays were performed as previously described ^{1,2}. In brief, 45 nM Cas13 protein (either CcaCas13b or LwaCas13a), 20 nM crRNA, 1 nM target RNA, 125 nM RNAse Alert v2 (Invitrogen), and 1 unit/μL murine RNase inhibitor (NEB) were combined together in 20 μL of cleavage buffer (20 mM HEPES, 60 mM NaCl, 6 mM MgCl2, pH 6.8). Reactions were incubated at 37° C. on a Biotek plate reader for 3 hours with fluorescent kinetic measurements taken every 5 minutes.

SHERLOCK Nucleic Acid Detection with RPA

[0289] For RPA reactions, primers were designed using NCBI Primer-BLAST²⁶ under default parameters except for (100-140 nt), primer melting temperatures (54° C.-67° C.), and primer size (30-35 nt). All primers were ordered as DNA (Integrated DNA Technologies).

[0290] One-pot SHERLOCK-RPA reactions were carried out as previously described^{1,2} with slight modifications. Reactions were prepared with the following reagents (added in order): 0.5× RPA rehydration and 0.5× resuspended RPA lyophilized pellet, 2 mM rNTPs, 1.1 units/μL RNAse inhibitor, 1 unit/μL T7 RNA polymerase (Lucigen), 0.96 μM total RPA primers (0.48 μM each of forward primer with T7 handle and reverse primer), 57.8 nM Cas13 protein (CcaCas13b or LwaCas13a), 23.3 nM crRNA, 136.5 nM fluorescent substrate reporter, 5 mM MgCl2, 14 mM MgAc, and varying amounts of DNA target input.

[0291] For detection with fluorescent readout, either a quenched polyU FAM reporter (TriLink) or RNAse Alert v2 (Invitrogen), were used as reporters. 20 μL reactions were incubated for 2-6 hours at 37° C. on a Biotek plate reader with kinetic measurements taken either every 2.5 or 5 minutes. All reporter sequences are listed in Table 5.

[0292] One-pot SHERLOCK-RPA reactions were modified for multiplexing by maintaining total primer concentration at 0.96 μM over all four input primers (0.24 μM each of both forward primers with T7 handle and reverse primers), maintaining crRNA concentrations at 23.3 nM (with 11.7 nM each crRNA), maintaining Cas13 total protein concentration at 57.8 nM, (28.9 nM CcaCas13b and 28.9 nM LwaCas13a), and doubling total reporter concentration (136.5 nM LwaCas13a AU-FAM reporter; 136.5 nM CcaCas13b UA-HEX reporter; see Table 5 for all reporters). 20 μL reactions were incubated for 2-6 hours at 37° C. on a Biotek plate reader with kinetic measurements in wavelengths for HEX and FAM taken every 2.5 or 5 minutes.

### Protein Expression and Purification of UvrD Helicases

[0293] UvrD Helicases sequences were ordered as E. coli codon optimized gBlocks Gene Fragments (IDT) and cloned into TwinStrep-SUMO-expression plasmid via Gibson assembly. Alanine Super-helicase' mutants were generated using PIPE-site-directed mutagenesis cloning from the TwinStrep-SUMO-UvrD Helicase expression plasmids. In brief, primers with short overlapping sequences at their ends were designed to harbor the desired changes. After incomplete-extension PCR amplification (KAPA HiFi HotStart 2× PCR), reactions were treated with Dpnl restriction endonuclease for 30 minutes at 37° C. to degrade parental plasmid. Two microliters of the reaction were directly transformed into Stble3 chemically competent E. coli cells. For expression, sequence verified plasmids were transformed into BL21(DE3)pLysE E. coli cells. For each UvrD Helicase variant, 2 L of Terrific Broth media (12 g/L tryptone, 24 g/L yeast extract, 9.4 g/L K2HPO, 2.2 g/L KH2PO4), supplemented with 100 μg/mL ampicillin, was inoculated with 20 mL of overnight starter culture and grown until OD600 0.4-0.6. Protein expression was induced with the addition of 0.5 mM IPTG and carried out for 16 hours at 21° C. with 250 RPM shaking speed. Cells were collected by centrifugation at 5,000 RPM for 10 minutes, and paste was directly used for protein purification (10-20 g total cell paste). For lysis, 10 g of bacterial paste was resuspended via stirring at 4° C. in 50 mL of lysis buffer (50 mM Tris-HCl pH 8, 500 mM NaCl, 1 mM BME (Beta-Mercapotethanol, Sigma) supplemented with 50 mg Lysozyme, 10 tablets of protease inhibitors (cOmplete, EDTA-free, Roche Diagnostics Corporation), and 500 U of Benzonase (Sigma). The suspension was passed through a LM20 microfluidizer at 25,000 psi, and lysate was cleared by centrifugation at 10,000 RPM, 4° C. for 1 hour. Lysate was incubated with 2 mL of StrepTactin superflow resin (Qiagen) for 2 hours at 4° C. on a rotary shaker. Resin bound with protein was washed three times with 10 mL of lysis buffer, followed by addition of 50 μL SUMO protease (in house) in 20 mL of IGEPAL lysis buffer (0.2% IGEPAL). Cleavage of the SUMO tag and release of native protein was carried out overnight at 4° C. in Econo-column chromatography column under gentle mixing on a table shaker. Cleaved protein was collected as flow-through, washed three times with 5 mL of lysis buffer, and checked on a SDS-PAGE gel.

[0294] Protein was diluted ion exchange buffer A containing no salt (50 mM Tris-HCl pH 8, 6 mM BME (Beta-Mercapotethanol, Sigma), 5% Glycerol, 0.1 mM EDTA) to get the starting NaCl concentration of 50 mM. Protein was then loaded onto a 5 mL Heparin HP column (GE Healthcare Life Sciences) and eluted over a NaCl gradient from 50 mM to 1 M. Fractions of eluted protein were analyzed by SDS-PAGE gel and Coomassie staining, pooled and concentrated to 1 mL using 10 MWCO centrifugal filters (Amicon). Concentrated protein was loaded in 0.5-3 mL 10 MWCO Slide-A-Lyzer Dialysis cassettes and dialyzed overnight at 4° C. against protein storage buffer (20 mM Tris-HCl, pH 7.5, 200 mM NaCl, 1 mM EDTA, 1 mM TCEP, 50% glycerol). Protein was quantified using Pierce reagent (Thermo) and stored at −20° C.

### Lateral Flow Readout of Cas13 and SHERLOCK

[0295] For single-plex detection with lateral flow readout, a FAM-RNA-biotin reporter was substituted in Cas13 or SHERLOCK reactions for the fluorescent reporter at a final concentration of 1 μM (unless otherwise indicated). 20 μL reactions were incubated between 30 and 180 minutes, after which the entire reaction was resuspended in 100 μL of HybriDetect 1 assay buffer (Milenia). Visual readout was achieved with HybriDetect 1 lateral flow strips (Milenia), and strips were imaged in a light box with a α7 III with 35-mm full-frame image sensor camera (Sony) equipped with a FE2.8/90 Macro G OSS lens.

[0296] Two-pot SHERLOCK-RPA multiplexed lateral flow reactions were adapted from previously described multiplexed fluorescent reactions^{1,2}. In brief, RPA reactions were performed with the TwistAmp® Basic (TwistDx) protocol with the exception that 280 mM MgAc was added prior to input DNA. Reactions were run with 1 μL of input for 1 hr at 37° C. Cas13 detection assays were performed with 45 nM purified Cas13, 22.5 nM crRNA, lateral flow RNA reporter (4 μM LwaCas13a multiplexed reporter; 2 μM CcaCas13b multiplexed reporter; see Table 5 for all reporters), 0.5 μL murine RNase inhibitor (New England Biolabs), and 1 μL of post-RPA input nucleic acid target in nuclease assay buffer (20 mM HEPES, 60 mM NaCl, 6 mM MgCl₂, pH 6.8). 20 μL reactions were suspended in 100 μL of HybriDetect 1 assay buffer (Milenia) and run on custom multiplexed strips (DCN Diagnostics). The custom lateral flow strips were designed to have capture lines containing Anti-digoxigenin antibodies (ab64509, abcam), Streptavidin, Anti-FITC antibodies (ab19224, abcam), and Anti-Alexa 488 antibodies (A619224, Life Technologies). The strips consisted of a 25 mm CN95 Sartorius nitrocellulose membrane, an 18 mm 6614 Ahlstrom synthetic conjugate pad for sample application, and a 22 mm Ahlstrom grade 319 paper wick pad. Strips were imaged using an Azure c400 imaging system in the Cy5 channel.

[0297] One-pot multiplexed SHERLOCK-RPA was adapted for lateral flow by lowering the CcaCas13b multiplexed reporter concentration to a concentration of 78 nM and the LwaCas13a reporter concentration to 1 μM (see Table 5 for all reporters). This was to accommodate for different fluorescent intensities observed for the reporter when binding to the DCN strips. Lateral flow reactions were resuspended in buffer, run on DCN strips, and imaged as described above.

### Fluorescent Helicase Activity Assay

[0298] Helicase substrate was generated by annealing 300 pmol of fluorescent 5′-FAM-top strand with 900 pmol of quencher 3′-BHQ1 bottom strand in lx duplex buffer (30 mM HEPES, pH 7.5; 100 mM potassium acetate) for 5 minutes at 95° C., followed by slow cool down to 4° C. (1° C./5 seconds) in PCR thermocycler. After annealing, reactions were diluted 1:10 in Nuclease free water (Gibco). Helicase unwinding assays were carried out in 20 μL reactions containing 1× Thermopol buffer (NEB), 250 nM of annealed quenched helicase substrate, 3 mM ATP or 3 mM dATP (The-UvrD dATP), 200 nM UvrD Helicase and 500 nM of capture strand oligonucleotide. To determine temperature activity profiles, reactions and no helicase control were incubated at temperatures ranging from 37° C. to 62° C. with 5° C. intervals for 60 minutes in a PCR thermocycler. Reactions were immediately transferred to a 384-well plate (Corning®) and analyzed on a fluorescent plate reader (BioTek) equipped with a FAM/HEX filter set.

SHERLOCK Nucleic Acid Detection with HDA

[0299] For detection with SHERLOCK-HDA, procedures for amplification were inspired by previously described isothermal helicase dependent amplification^{20,27} with significant modifications. Reactions were prepared with the following reagents: 1× Sau polymerase buffer (Intact Genomics), 2.5% PEG 30%, 1 mM rNTPs, 0.4 mM dNTPs, and 3 mM ATP, 1 units/μL, RNAse inhibitor, 1.5 unit/μL T7 RNA polymerase (Lucigen), 0.4 μM total HDA primers (0.2 μM each of forward primer with T7 handle and reverse primer), 43.3 nM Cas13 protein (CcaCas13b or LwaCas13a), 19.8 nM crRNA, 125 nM fluorescent substrate reporter (quenched polyU FAM reporter, TriLink), 0.2 units/μL, Sau polymerase, 25 ng/μL T4 gp32 protein (NEB), 6.25 ng UvrD helicase, and varying amounts of DNA target input. 20 μL reactions were incubated for 2-6 hours at 37° C. on a Biotek plate reader with kinetic measurements taken either every 2.5 or 5 minutes.

### Digital Droplet PCR Quantification of Input DNA

[0300] DNA and RNA dilution series used as input target for one-pot SHERLOCK-RPA amplification reactions were quantified separately using Droplet Digital PCR (BioRad), as described before^{1,2}. Briefly, ddPCR probes were ordered from IDT PrimeTime qPCR probes with a quenched FAM/ZEN reporter. Dilution series were mixed with either (for DNA) BioRad's Supermix for Probes (no dUTP) or with (for RNA) BioRad's One-Step RT-ddPCR Advanced Kit for Probes and the corresponding qPCR probe for the target sequence. The QX200 droplet generator (BioRad) was used to generate droplets; after transferring to a droplet digital PCR plate (BioRad), thermal cycling was carried out with conditions as described in the BioRad protocol (with the exception of the Ea175 target, for which the annealing temperature was lowered according to the lower melting temperature of the primer set). Concentrations were measured using a QX200 droplet reader (Rare Event Detection, RED).

### Analysis of SHERLOCK Fluorescence Data

[0301] Fluorescent measurements were analyzed as described previously^{1,2}. Background subtracted fluorescence was calculated by subtracting the initial measured fluorescence. All reactions were run with at least three technical replicates and a control condition containing no target input.

### Analysis of Lateral Flow Results

[0302] Acquired images were converted to 8-bit grayscale using photoshop and then imported into ImageLab software (BioRad Image Lab Software 6.0.1). Images were inverted and lanes were manually adjusted to fit the lateral flow strips. Bands were picked automatically and the background was adjusted manually to allow band comparison. Width of bands and background adjustment was kept constant between all bands in the same image.

Predictive Model of Cas13 crRNA Activity

[0303] Guide activity values from the Cas13 detection tiling experiments were pre-processed by background subtracting the zero time-point fluorescence from the terminal fluorescence value. On a per-target basis, these values were further normalized to the max or median value or used as raw fluorescence values. Training was performed using a series of thresholds to classify guides into two classes (good or bad) and the best threshold was selected based on model performance. Separately, performance was also compared to separating guides into two classes based on being in the top quintile per target (good guides). For each protein (LwaCas13a or CcaCas13b), the best guide classification method was selected based on model performance.

[0304] To generate features for each guide, one-hot encoding was used to represent mono-nucleotide and di-nucleotide base identities across the guide and flanking sequence in the target. The flanking sequence length was an additional variable that was determined by measuring model performance across different flanking sequence lengths. Additional features used were normalized positions of the guide in the target and the GC content of the guide.

[0305] Logistic regressions were tested across the variable guide classification methods, flanking sequence lengths, logistic regulation tuning parameters, and regularization methods (L1 and L2). Training was performed by separating the training set into three smaller sets for training, testing, and validation. After performing three-fold cross validation on the train and test sets, a final validation of the best model was used to generate AUC curves and assay final model performance. The best performing models were then selected for the LwaCas13a and CcaCas13b datasets.

### In Vivo Knockdown Experiments

[0306] To evaluate the in vivo predictive performance of the LwaCas13a guide design model, Applicants tested guide knockdown in mammalian cell culture. Knockdown experiments were performed in HEK293FT cells (American Type Culture Collection (ATCC)), which were grown in Dulbecco's Modified Eagle Medium with high glucose, sodium pyruvate, and GlutaMAX (Thermo Fisher Scientific), additionally supplemented with lx penicillin-streptomycin (Thermo Fisher Scientific) and 10% fetal bovine serum (VWR Seradigm). Twenty-four hours prior to transfection, cells were plated at 20,000 cells per well in 96-well poly-D-lysine plates (BD Biocoat). When cells reached −90% confluency, 150 ng of LwaCas13 plasmid, 300 ng of guide expression plasmid, and 40 ng of luciferase reporter plasmid were transfected using Lipofectamine 2000 (Thermo Fisher Scientific). Plasmids were combined in Opti-MEM I Reduced Serum Medium (Thermo Fisher) to a total of 25 μL and added to 25 μL of a 2% Lipofectamine 2000 mixture in Opti-MEM. After incubation for 10 minutes, the plasmid Lipofectamine solutions were added to cells. At 48 hours post transfection, supernatant was harvested to measure secreted Gaussia luciferase and Cypridina luciferase levels using assay kits (Targeting Systems) on a plate reader (Biotek Synergy Neo 2) with an injection protocol. All replicates performed are biological replicates.

Sample Collection and Acquisition from Patients with PML-RARa and BCR-ABL Fusions

[0307] Cryopreserved bone marrow samples were obtained from the Pasquerello Tissue Bank at the Dana-Farber Cancer Institute following database query for samples harboring the PML-RARa and BCR-ABL fusion transcripts. Fresh peripheral blood and bone marrow aspirate was also obtained from 3 newly diagnosed patients (samples 1, 12, 15). All patients from whom samples were obtained had consented to the institutional tissue banking IRB protocol.

Extraction of RNA from Patient Samples with PML-RARa and BCR-ABL Fusions

[0308] Cryopreserved samples were washed with PBS and pelleted. Fresh samples (samples 1, 12, 15) collected in EDTA tubes were first treated with RBC Lysis Buffer (BD Pharmlyse) followed by PBS washes and pelleted. RNA was then extracted using the Qiagen RNeasy Kit. RNA concentrations are shown in table 8.

RT-PCR validation of PML-RARa and BCR-ABL Transcripts

[0309] cDNA was generated from 0.2-1 ug of RNA per sample using the Qiagen Quantitect Reverse Transcription kit. Nested PCR was performed using the previously validated, target specific primers and protocol described in van Dongen et al.²⁸. Primer sequences are in table 9. PCR products were visualized on a 2.5% agarose gel, shown in FIG. 13A-13D. Expected Band Sizes with nested primer sets: PML-RARa Intron 6 (214 bp); PML-RARa Intron 3 (289 bp); BCR-ABL p210 e14a2 (360 bp); BCR-ABL p210 e13a2 (285 bp); BCR-ABL p190 (e1a2: 381 bp). Note that samples with exon 6 breakpoint will have variable size bands depending on the position of breakpoint: for example, multiple bands are present in samples 4-6 (FIG. 14). GAPDH was run as a control (FIG. 14) with an expected band size of 138 bp.

Design of crRNA Targeting APML and BCR-ABL Fusion Transcripts with SHERLOCK Guide Model

[0310] Best and worst guides were predicted using the guide design web tool (sherlock.genome-engineering.org) for LwaCas13a and CcaCas13b guide design published in this study. For validation of the guide design tool, crRNAs tiling along the fusion transcript were also synthesized and tested for collateral activity (data reported in FIGS. 2, 8, and 15). The best predicted guides were used in detection of PML-RARa and BCR-ABL fusion transcripts in SHERLOCK detection assays described below.

Detection of APML and BCR-ABL Clinical RNA Ssamples with SHERLOCK

[0311] Two-step SHERLOCK assays were performed as previously described with slight modifications to the RPA protocol^{1,2}. In brief, basic RPA reactions were performed with the TwistAmp® Basic (TwistDx) protocol modified to perform RT-RPA with the following changes: 10 units/uL of AMV-RT was added after resuspension of pellet and addition of primers, following which 280 mM MgAc was added, all prior to input DNA. RT-RPA reactions at a total volume of 11 uL were run with 1 μL of input RNA for 45 minutes at 42° C. RT-RPA reactions for each fusion transcript were performed with all primer sets for all three transcripts detected in this study (PML-RARa Intron/Exon 6; PML-RARa Intron 3; BCR-ABL p210 b3a2).

[0312] Cas13 detection reactions were performed as described above with LwaCas13a and the best guide determined with the machine learning model, with the exception that reactions with a final volume of 20 uL contained 0.5 uL of input from RPA reactions. Reactions were supplemented with either RNAse Alert v2 (Invitrogen) for fluorescent readout, or a FAM-RNA-biotin reporter for lateral flow readout; reactions were incubated and quantified as described above respectively.

[0313] The initial set of samples (samples 1-11, 13-14, 16-19) were blinded for both steps of SHERLOCK detection; samples 12 and 15 were run as separate experiments as new patient samples became available. Data for both fluorescence and lateral flow were normalized to make the combined figures shown in FIG. 5 by subtracting the readout of a control reaction (RPA reaction with water input) for each experiment to include both blinded and non-blinded samples.

[0314] Two-pot SHERLOCK-RPA multiplexed lateral flow reactions were carried out as described above, with the exception reporter concentrations were lowered to a final concentration of 1 uM LwaCas13a reporter and 250 nM CcaCas13b reporter (see Table 5 for all reporters). 20 μL reactions were suspended in 100 μL of HybriDetect 1 assay buffer (Milenia) and run on custom multiplexed strips (DCN Diagnostics), and were visualized and quantified as described above.

TABLE 1
Guide RNA sequences used in this study

| | | | | | Direct | | 1st |
|---|---|---|---|---|---|---|---|
| Fig | Name | Ortholog | Complete crRNA sequence | Spacer | repeat | Target | Fig. |
| 7a | dengue_0 | LwaCas13a | GATTTAGACTACCCCAAAA | ttgagaggtt | GATTTAGACTAC | Dengue | 7a |
| | 0 | | ACGAAGGGGACTAAAACttg | ggcccctga | CCCAAAAACGAA | ssRNA | |
| | | | agaggttggcccctgaatatgtact | atatgtact | GGGGACTAAAAC | | |
| | | | (SEQ ID. NO: 12) | (SEQ ID. | (SEQ ID. | | |
| | | | | NO: 13) | NO: 14) | | |
| 7a | dengue_0 | LwaCas13a | GATTTAGACTACCCCAAAA | gttgagaggt | GATTTAGACTAC | Dengue | 7a |
| | 1 | | ACGAAGGGGACTAAAACgtt | tggcccctg | CCCAAAAACGAA | ssRNA | |
| | | | gagaggttggcccctgaatatgtac | aatatgtac | GGGGACTAAAAC | | |
| | | | (SEQ ID. NO: 15) | (SEQ ID. | (SEQ ID. | | |
| | | | | NO: 16) | NO: 17) | | |
| 7a | dengue_0 | LwaCas13a | GATTTAGACTACCCCAAAA | tgttgagagg | GATTTAGACTAC | Dengue | 7a |
| | 2 | | ACGAAGGGGACTAAAACtgt | ttggcccctg | CCCAAAAACGAA | ssRNA | |
| | | | tgagaggttggcccctgaatatgta | aatatgta | GGGGACTAAAAC | | |
| | | | (SEQ ID. NO: 18) | (SEQ ID. | (SEQ ID. | | |
| | | | | NO: 19) | NO: 20) | | |
| 7a | dengue_0 | LwaCas13a | GATTTAGACTACCCCAAAA | ttgttgagag | GATTTAGACTAC | Dengue | 7a |
| | 3 | | ACGAAGGGGACTAAAACttg | gttggcccct | CCCAAAAACGAA | ssRNA | |
| | | | ttgagaggttggcccctgaatatgt | gaatatgt | GGGGACTAAAAC | | |
| | | | (SEQ ID. NO: 21) | (SEQ ID. | (SEQ ID. | | |
| | | | | NO: 22) | NO: 23) | | |
| 7a | dengue_0 | LwaCas13a | GATTTAGACTACCCCAAAA | attgttgaga | GATTTAGACTAC | Dengue | 7a |
| | 4 | | ACGAAGGGGACTAAAACatt | ggttggccc | CCCAAAAACGAA | ssRNA | |
| | | | gttgagaggttggcccctgaatatg | ctgaatatg | GGGGACTAAAAC | | |
| | | | (SEQ ID. NO: 24) | (SEQ ID. | (SEQ ID. | | |
| | | | | NO: 25) | NO: 26) | | |
| 7a | dengue_0 | LwaCas13a | GATTTAGACTACCCCAAAA | cattgttgag | GATTTAGACTAC | Dengue | 7a |
| | 5 | | ACGAAGGGGACTAAAACcat | aggttggcc | CCCAAAAACGAA | ssRNA | |
| | | | tgttgagaggttggcccctgaatat | cctgaatat | GGGGACTAAAAC | | |
| | | | (SEQ ID. NO: 27) | (SEQ ID. | (SEQ ID. | | |
| | | | | NO: 28) | NO: 29) | | |
| 7a | dengue_0 | LwaCas13a | GATTTAGACTACCCCAAAA | tcattgttgag | GATTTAGACTAC | Dengue | 7a |
| | 6 | | ACGAAGGGGACTAAAACtca | aggttggcc | CCCAAAAACGAA | ssRNA | |
| | | | ttgttgagaggttggcccctgaata | cctgaata | GGGGACTAAAAC | | |
| | | | (SEQ ID. NO: 30) | (SEQ ID. | (SEQ ID. | | |
| | | | | NO: 31) | NO: 32) | | |
| 7a | dengue_0 | LwaCas13a | GATTTAGACTACCCCAAAA | gtcattgttga | GATTTAGACTAC | Dengue | 7a |
| | 7 | | ACGAAGGGGACTAAAACgtc | gaggttggc | CCCAAAAACGAA | ssRNA | |
| | | | attgttgagaggttggcccctgaat | ccctgaat | GGGGACTAAAAC | | |
| | | | (SEQ ID. NO: 33) | (SEQ ID. | (SEQ ID. | | |
| | | | | NO: 34) | NO: 35) | | |
| 7a | dengue_0 | LwaCas13a | GATTTAGACTACCCCAAAA | cgtcattgttg | GATTTAGACTAC | Dengue | 7a |
| | 8 | | ACGAAGGGGACTAAAACcgt | agaggttgg | CCCAAAAACGAA | ssRNA | |
| | | | cattgttgagaggttggcccctgaa | cccctgaa | GGGGACTAAAAC | | |
| | | | (SEQ ID. NO: 36) | (SEQ ID. | (SEQ ID. | | |
| | | | | NO: 37) | NO: 38) | | |
| 7a | dengue_0 | LwaCas13a | GATTTAGACTACCCCAAAA | tcgtcattgtt | GATTTAGACTAC | Dengue | 7a |
| | 9 | | ACGAAGGGGACTAAAACtcg | gagaggttg | CCCAAAAACGAA | ssRNA | |
| | | | tcattgttgagaggttggcccctga | gcccctga | GGGGACTAAAAC | | |
| | | | (SEQ ID. NO: 39) | (SEQ ID. | (SEQ ID. | | |
| | | | | NO: 40) | NO: 41) | | |
| 7a | dengue_1 | LwaCas13a | GATTTAGACTACCCCAAAA | ttcgtcattgt | GATTTAGACTAC | Dengue | 7a |
| | 0 | | ACGAAGGGGACTAAAACttc | tgagaggttg | CCCAAAAACGAA | ssRNA | |
| | | | gtcattgttgagaggttggcccctg | gcccctg | GGGGACTAAAAC | | |
| | | | (SEQ ID. NO: 42) | (SEQ ID. | (SEQ ID. | | |
| | | | | NO: 43) | NO: 44) | | |
| 7a | dengue_1 | LwaCas13a | GATTTAGACTACCCCAAAA | cttcgtcattg | GATTTAGACTAC | Dengue | 7a |
| | 1 | | ACGAAGGGGACTAAAACctt | ttgagaggtt | CCCAAAAACGAA | ssRNA | |
| | | | cgtcattgttgagaggttggcccct | ggcccct | GGGGACTAAAAC | | |
| | | | (SEQ ID. NO: 45) | (SEQ ID. | (SEQ ID. | | |
| | | | | NO: 46) | NO: 47) | | |
| S1a | dengue_1 | LwaCas13a | GATTTAGACTACCCCAAAA | tcttcgtcatt | GATTTAGACTAC | Dengue | 7a |
| | 2 | | ACGAAGGGGACTAAAACtct | gttgagaggt | CCCAAAAACGAA | ssRNA | |
| | | | tcgtcattgttgagaggttggcccc | tggcccc | GGGGACTAAAAC | | |
| | | | (SEQ ID. NO: 48) | (SEQ ID. | (SEQ ID. | | |
| | | | | NO: 49) | NO: 50) | | |
| 7a | dengue_1 | LwaCas13a | GATTTAGACTACCCCAAAA | gtcttcgtcat | GATTTAGACTAC | Dengue | 7a |
| | 3 | | ACGAAGGGGACTAAAACgtc | tgttgagagg | CCCAAAAACGAA | ssRNA | |
| | | | ttcgtcattgttgagaggttggccc | ttggccc | GGGGACTAAAAC | | |
| | | | (SEQ ID. NO: 51) | (SEQ ID. | (SEQ ID. | | |
| | | | | NO: 52) | NO: 53) | | |
| 7a | dengue_1 | LwaCas13a | GATTTAGACTACCCCAAAA | ggtcttcgtc | GATTTAGACTAC | Dengue | 7a |
| | 4 | | ACGAAGGGGACTAAAACggt | attgttgaga | CCCAAAAACGAA | ssRNA | |
| | | | cttcgtcattgttgagaggttggcc | ggttggcc | GGGGACTAAAAC | | |
| | | | (SEQ ID. NO: 54) | (SEQ ID. | (SEQ ID. | | |
| | | | | NO: 55) | NO: 56) | | |
| 7a | dengue_1 | LwaCas13a | GATTTAGACTACCCCAAAA | tggtcttcgtc | GATTTAGACTAC | Dengue | 7a |
| | 5 | | ACGAAGGGGACTAAAACtgg | attgttgaga | CCCAAAAACGAA | ssRNA | |
| | | | tcttcgtcattgttgagaggttggc | ggttggc | GGGGACTAAAAC | | |
| | | | (SEQ ID. NO: 57) | (SEQ ID. | (SEQ ID. | | |
| | | | | NO: 58) | NO: 59) | | |
| 7a | dengue_1 | LwaCas13a | GATTTAGACTACCCCAAAA | atggtcttcgt | GATTTAGACTAC | Dengue | 7a |
| | 6 | | ACGAAGGGGACTAAAACatg | cattgttgag | CCCAAAAACGAA | ssRNA | |
| | | | gtcttcgtcattgttgagaggttgg | aggttgg | GGGGACTAAAAC | | |
| | | | (SEQ ID. NO: 60) | (SEQ ID. | (SEQ ID. | | |
| | | | | NO: 61) | NO: 62) | | |
| 7a | dengue_1 | LwaCas13a | GATTTAGACTACCCCAAAA | catggtcttc | GATTTAGACTAC | Dengue | 7a |
| | 7 | | ACGAAGGGGACTAAAACcat | gtcattgttga | CCCAAAAACGAA | ssRNA | |
| | | | ggtcttcgtcattgttgagaggttg | gaggttg | GGGGACTAAAAC | | |
| | | | (SEQ ID. NO: 63) | (SEQ ID. | (SEQ ID. | | |
| | | | | NO: 64) | NO: 65) | | |
| 7a | dengue_1 | LwaCas13a | GATTTAGACTACCCCAAAA | gcatggtctt | GATTTAGACTAC | Dengue | 7a |
| | 8 | | ACGAAGGGGACTAAAACgca | cgtcattgttg | CCCAAAAACGAA | ssRNA | |
| | | | tggtcttcgtcattgttgagaggtt | agaggtt | GGGGACTAAAAC | | |
| | | | (SEQ ID. NO: 66) | (SEQ ID. | (SEQ ID. | | |
| | | | | NO: 67) | NO: 68) | | |
| 7a | dengue_1 | LwaCas13a | GATTTAGACTACCCCAAAA | agcatggtct | GATTTAGACTAC | Dengue | 7a |
| | 9 | | ACGAAGGGGACTAAAACagc | tcgtcattgtt | CCCAAAAACGAA | ssRNA | |
| | | | atggtcttcgtcattgttgagaggt | gagaggt | GGGGACTAAAAC | | |
| | | | (SEQ ID. NO: 69) | (SEQ ID. | (SEQ ID. | | |
| | | | | NO: 70) | NO: 71) | | |
| 7a | dengue_2 | LwaCas13a | GATTTAGACTACCCCAAAA | tgagcatggt | GATTTAGACTAC | Dengue | 7a |
| | 0 | | ACGAAGGGGACTAAAACtga | cttcgtcattg | CCCAAAAACGAA | ssRNA | |
| | | | gcatggtcttcgtcattgttgagag | ttgagag | GGGGACTAAAAC | | |
| | | | (SEQ ID. NO: 72) | (SEQ ID. | (SEQ ID. | | |
| | | | | NO: 73) | NO: 74) | | |
| 7a | dengue_2 | LwaCas13a | GATTTAGACTACCCCAAAA | agtgagcat | GATTTAGACTAC | Dengue | 7a |
| | 1 | | ACGAAGGGGACTAAAACagt | ggtcttcgtc | CCCAAAAACGAA | ssRNA | |
| | | | gagcatggtcttcgtcattgttgag | attgttgag | GGGGACTAAAAC | | |
| | | | (SEQ ID. NO: 75) | (SEQ ID. | (SEQ ID. | | |
| | | | | NO: 76) | NO: 77) | | |
| 7a | dengue_2 | LwaCas13a | GATTTAGACTACCCCAAAA | ccagtgagc | GATTTAGACTAC | Dengue | 7a |
| | 2 | | ACGAAGGGGACTAAAACcca | atggtcttcgt | CCCAAAAACGAA | ssRNA | |
| | | | gtgagcatggtcttcgtcattgttg | cattgttg | GGGGACTAAAAC | | |
| | | | (SEQ ID. NO: 78) | (SEQ ID. | (SEQ ID. | | |
| | | | | NO: 79) | NO: 80) | | |
| 7a | dengue_2 | LwaCas13a | GATTTAGACTACCCCAAAA | gtccagtga | GATTTAGACTAC | Dengue | 7a |
| | 3 | | ACGAAGGGGACTAAAACgtc | gcatggtctt | CCCAAAAACGAA | ssRNA | |
| | | | cagtgagcatggtcttcgtcattgt | cgtcattgt | GGGGACTAAAAC | | |
| | | | (SEQ ID. NO: 81) | (SEQ ID. | (SEQ ID. | | |
| | | | | NO: 82) | NO: 83) | | |
| 7a | dengue_2 | LwaCas13a | GATTTAGACTACCCCAAAA | ctgtccagtg | GATTTAGACTAC | Dengue | 7a |
| | 4 | | ACGAAGGGGACTAAAACctg | agcatggtct | CCCAAAAACGAA | ssRNA | |
| | | | tccagtgagcatggtcttcgtcatt | tcgtcatt | GGGGACTAAAAC | | |
| | | | (SEQ ID. NO: 84) | (SEQ ID. | (SEQ ID. | | |
| | | | | NO: 85) | NO: 86) | | |
| 7a | dengue_2 | LwaCas13a | GATTTAGACTACCCCAAAA | ttctgtccagt | GATTTAGACTAC | Dengue | 7a |
| | 5 | | ACGAAGGGGACTAAAACttc | gagcatggt | CCCAAAAACGAA | ssRNA | |
| | | | tgtccagtgagcatggtcttcgtca | cttcgtca | GGGGACTAAAAC | | |
| | | | (SEQ ID. NO: 87) | (SEQ ID. | (SEQ ID. | | |
| | | | | NO: 88) | NO: 89) | | |
| 7a | dengue_2 | LwaCas13a | GATTTAGACTACCCCAAAA | gcttctgtcc | GATTTAGACTAC | Dengue | 7a |
| | 6 | | ACGAAGGGGACTAAAACgct | agtgagcat | CCCAAAAACGAA | ssRNA | |
| | | | tctgtccagtgagcatggtcttcgt | ggtcttcgt | GGGGACTAAAAC | | |
| | | | (SEQ ID. NO: 90) | (SEQ ID. | (SEQ ID. | | |
| | | | | NO: 91) | NO: 92) | | |
| 7a | dengue_2 | LwaCas13a | GATTTAGACTACCCCAAAA | ttgcttctgtc | GATTTAGACTAC | Dengue | 7a |
| | 7 | | ACGAAGGGGACTAAAACttg | cagtgagca | CCCAAAAACGAA | ssRNA | |
| | | | cttctgtccagtgagcatggtcttc | tggtcttc | GGGGACTAAAAC | | |
| | | | (SEQ ID. NO: 93) | (SEQ ID. | (SEQ ID. | | |
| | | | | NO: 94) | NO: 95) | | |
| 7a | dengue_2 | LwaCas13a | GATTTAGACTACCCCAAAA | ttttgcttctg | GATTTAGACTAC | Dengue | 7a |
| | 8 | | ACGAAGGGGACTAAAACtttt | tccagtgagc | CCCAAAAACGAA | ssRNA | |
| | | | gcttctgtccagtgagcatggtct | atggtct | GGGGACTAAAAC | | |
| | | | (SEQ ID. NO: 96) | (SEQ ID. | (SEQ ID. | | |
| | | | | NO: 97) | NO: 98) | | |
| 7a | dengue_2 | LwaCas13a | GATTTAGACTACCCCAAAA | atttttgcttc | GATTTAGACTAC | Dengue | 7a |
| | 9 | | ACGAAGGGGACTAAAACatt | tgtccagtga | CCCAAAAACGAA | ssRNA | |
| | | | tttgcttctgtccagtgagcatggt | gcatggt | GGGGACTAAAAC | | |
| | | | (SEQ ID. NO: 99) | (SEQ ID. | (SEQ ID. | | |
| | | | | NO: 100) | NO: 101) | | |
| 7a | dengue_3 | LwaCas13a | GATTTAGACTACCCCAAAA | gcatttttgct | GATTTAGACTAC | Dengue | 7a |
| | 0 | | ACGAAGGGGACTAAAACgca | tctgtccagt | CCCAAAAACGAA | ssRNA | |
| | | | tttttgcttctgtccagtgagcatg | gagcatg | GGGGACTAAAAC | | |
| | | | (SEQ ID. NO: 102) | (SEQ ID. | (SEQ ID. | | |
| | | | | NO: 103) | NO: 104) | | |
| 7a | dengue_3 | LwaCas13a | GATTTAGACTACCCCAAAA | cagcatttttg | GATTTAGACTAC | Dengue | 7a |
| | 1 | | ACGAAGGGGACTAAAACcag | cttctgtcca | CCCAAAAACGAA | ssRNA | |
| | | | catttttgcttctgtccagtgagca | gtgagca | GGGGACTAAAAC | | |
| | | | (SEQ ID. NO: 105) | (SEQ ID. | (SEQ ID. | | |
| | | | | NO: 106) | NO: 107) | | |
| 7a | dengue_3 | LwaCas13a | GATTTAGACTACCCCAAAA | agcagcattt | GATTTAGACTAC | Dengue | 7a |
| | 2 | | ACGAAGGGGACTAAAACagc | ttgcttctgtc | CCCAAAAACGAA | ssRNA | |
| | | | agcatttttgcttctgtccagtgag | cagtgag | GGGGACTAAAAC | | |
| | | | (SEQ ID. NO: 108) | (SEQ ID. | (SEQ ID. | | |
| | | | | NO: 109) | NO: 110) | | |
| 7a | dengue_3 | LwaCas13a | GATTTAGACTACCCCAAAA | ccagcagca | GATTTAGACTAC | Dengue | 7a |
| | 3 | | ACGAAGGGGACTAAAACcca | tttttgcttct | CCCAAAAACGAA | ssRNA | |
| | | | gcagcatttttgcttctgtccagtg | gtccagtg | GGGGACTAAAAC | | |
| | | | (SEQ ID. NO: 111) | (SEQ ID. | (SEQ ID. | | |
| | | | | NO: 112) | NO: 113) | | |
| 7a | dengue_3 | LwaCas13a | GATTTAGACTACCCCAAAA | gtccagcag | GATTTAGACTAC | Dengue | 7a |
| | 4 | | ACGAAGGGGACTAAAACgtc | catttttgctt | CCCAAAAACGAA | ssRNA | |
| | | | cagcagcatttttgcttctgtccag | ctgtccag | GGGGACTAAAAC | | |
| | | | (SEQ ID. NO: 114) | (SEQ ID. | (SEQ ID. | | |
| | | | | NO: 115) | NO: 116) | | |
| 7a | dengue_3 | LwaCas13a | GATTTAGACTACCCCAAAA | ttgtccagca | GATTTAGACTAC | Dengue | 7a |
| | 5 | | ACGAAGGGGACTAAAACttg | gcatttttgct | CCCAAAAACGAA | ssRNA | |
| | | | tccagcagcatttttgcttctgtcc | tctgtcc | GGGGACTAAAAC | | |
| | | | (SEQ ID. NO: 117) | (SEQ ID. | (SEQ ID. | | |
| | | | | NO: 118) | NO: 119) | | |
| 7a | dengue_3 | LwaCas13a | GATTTAGACTACCCCAAAA | tgttgtccag | GATTTAGACTAC | Dengue | 7a |
| | 6 | | ACGAAGGGGACTAAAACtgt | cagcatttttg | CCCAAAAACGAA | ssRNA | |
| | | | tgtccagcagcatttttgcttctgt | cttctgt | GGGGACTAAAAC | | |
| | | | (SEQ ID. NO: 120) | (SEQ ID. | (SEQ ID. | | |
| | | | | NO: 121) | NO: 122) | | |
| 7a | dengue_3 | LwaCas13a | GATTTAGACTACCCCAAAA | gatgttgtcc | GATTTAGACTAC | Dengue | 7a |
| | 7 | | ACGAAGGGGACTAAAACgat | agcagcattt | CCCAAAAACGAA | ssRNA | |
| | | | gttgtccagcagcatttttgcttct | ttgcttct | GGGGACTAAAAC | | |
| | | | (SEQ ID. NO: 123) | (SEQ ID. | (SEQ ID. | | |
| | | | | NO: 124) | NO: 125) | | |
| 7a | dengue_3 | LwaCas13a | GATTTAGACTACCCCAAAA | ttgatgttgtc | GATTTAGACTAC | Dengue | 7a |
| | 8 | | ACGAAGGGGACTAAAACttg | cagcagcatt | CCCAAAAACGAA | ssRNA | |
| | | | atgttgtccagcagcatttttgctt | tttgctt | GGGGACTAAAAC | | |
| | | | (SEQ ID. NO: 126) | (SEQ ID. | (SEQ ID. | | |
| | | | | NO: 127) | NO: 128) | | |
| 7a | dengue_3 | LwaCas13a | GATTTAGACTACCCCAAAA | tgttgatgttg | GATTTAGACTAC | Dengue | 7a |
| | 9 | | ACGAAGGGGACTAAAACtgt | tccagcagc | CCCAAAAACGAA | ssRNA | |
| | | | tgatgttgtccagcagcatttttgc | atttttgc | GGGGACTAAAAC | | |
| | | | (SEQ ID. NO: 129) | (SEQ ID. | (SEQ ID. | | |
| | | | | NO: 130) | NO: 131) | | |
| 7a | dengue_4 | LwaCas13a | GATTTAGACTACCCCAAAA | tgtgttgatgt | GATTTAGACTAC | Dengue | 7a |
| | 0 | | ACGAAGGGGACTAAAACtgt | tgtccagca | CCCAAAAACGAA | ssRNA | |
| | | | gttgatgttgtccagcagcattttt | gcattttt | GGGGACTAAAAC | | |
| | | | (SEQ ID. NO: 132) | (SEQ ID. | (SEQ ID. | | |
| | | | | NO: 133) | NO: 134) | | |
| 7a | dengue_4 | LwaCas13a | GATTTAGACTACCCCAAAA | ggtgtgttga | GATTTAGACTAC | Dengue | 7a |
| | 1 | | ACGAAGGGGACTAAAACggt | tgttgtccag | CCCAAAAACGAA | ssRNA | |
| | | | gtgttgatgttgtccagcagcattt | cagcattt | GGGGACTAAAAC | | |
| | | | (SEQ ID. NO: 135) | (SEQ ID. | (SEQ ID. | | |
| | | | | NO: 136) | NO: 137) | | |
| 7a | dengue_4 | LwaCas13a | GATTTAGACTACCCCAAAA | ctggtgtgtt | GATTTAGACTAC | Dengue | 7a |
| | 2 | | ACGAAGGGGACTAAAACctg | gatgttgtcc | CCCAAAAACGAA | ssRNA | |
| | | | gtgtgttgatgttgtccagcagcat | agcagcat | GGGGACTAAAAC | | |
| | | | (SEQ ID. NO: 138) | (SEQ ID. | (SEQ ID. | | |
| | | | | NO: 139) | NO: 140) | | |
| 7a | dengue_4 | LwaCas13a | GATTTAGACTACCCCAAAA | ttctggtgtgt | GATTTAGACTAC | Dengue | 7a |
| | 3 | | ACGAAGGGGACTAAAACttc | tgatgttgtcc | CCCAAAAACGAA | ssRNA | |
| | | | tggtgtgttgatgttgtccagcagc | agcagc | GGGGACTAAAAC | | |
| | | | (SEQ ID. NO: 141) | (SEQ ID. | (SEQ ID. | | |
| | | | | NO: 142) | NO: 143) | | |
| 7a | dengue_4 | LwaCas13a | GATTTAGACTACCCCAAAA | ccttctggtgt | GATTTAGACTAC | Dengue | 7a |
| | 4 | | ACGAAGGGGACTAAAACcct | gttgatgttgt | CCCAAAAACGAA | ssRNA | |
| | | | tctggtgtgttgatgttgtccagca | ccagca | GGGGACTAAAAC | | |
| | | | (SEQ ID. NO: 144) | (SEQ ID. | (SEQ ID. | | |
| | | | | NO: 145) | NO: 146) | | |
| 7a | dengue_4 | LwaCas13a | GATTTAGACTACCCCAAAA | tcccttctggt | GATTTAGACTAC | Dengue | 7a |
| | 5 | | ACGAAGGGGACTAAAACtcc | gtgttgatgtt | CCCAAAAACGAA | ssRNA | |
| | | | cttctggtgtgttgatgttgtccag | gtccag | GGGGACTAAAAC | | |
| | | | (SEQ ID. NO: 147) | (SEQ ID. | (SEQ ID. | | |
| | | | | NO: 148) | NO: 149) | | |
| 7a | dengue_4 | LwaCas13a | GATTTAGACTACCCCAAAA | aatcccttct | GATTTAGACTAC | Dengue | 7a |
| | 6 | | ACGAAGGGGACTAAAACaat | ggtgtgttga | CCCAAAAACGAA | ssRNA | |
| | | | cccttctggtgtgttgatgttgtcc | tgttgtcc | GGGGACTAAAAC | | |
| | | | (SEQ ID. NO: 150) | (SEQ ID. | (SEQ ID. | | |
| | | | | NO: 151) | NO: 152) | | |
| 7a | dengue_4 | LwaCas13a | GATTTAGACTACCCCAAAA | ataatcccttc | GATTTAGACTAC | Dengue | 7a |
| | 7 | | ACGAAGGGGACTAAAACata | tggtgtgttg | CCCAAAAACGAA | ssRNA | |
| | | | atcccttctggtgtgttgatgttgt | atgttgt | GGGGACTAAAAC | | |
| | | | (SEQ ID. NO: 153) | (SEQ ID. | (SEQ ID. | | |
| | | | | NO: 154) | NO: 155) | | |
| 7a | dengue_4 | LwaCas13a | GATTTAGACTACCCCAAAA | gtataatccc | GATTTAGACTAC | Dengue | 7a |
| | 8 | | ACGAAGGGGACTAAAACgta | ttctggtgtgt | CCCAAAAACGAA | ssRNA | |
| | | | taatcccttctggtgtgttgatgtt | tgatgtt | GGGGACTAAAAC | | |
| | | | (SEQ ID. NO: 156) | (SEQ ID. | (SEQ ID. | | |
| | | | | NO: 157) | NO: 158) | | |
| 7a | dengue_4 | LwaCas13a | GATTTAGACTACCCCAAAA | tggtataatc | GATTTAGACTAC | Dengue | 7a |
| | 9 | | ACGAAGGGGACTAAAACtgg | ccttctggtgt | CCCAAAAACGAA | ssRNA | |
| | | | tataatcccttctggtgtgttgatg | gttgatg | GGGGACTAAAAC | | |
| | | | (SEQ ID. NO: 159) | (SEQ ID. | (SEQ ID. | | |
| | | | | NO: 160) | NO: 161) | | |
| 7a | dengue_5 | LwaCas13a | GATTTAGACTACCCCAAAA | gctggtataa | GATTTAGACTAC | Dengue | 7a |
| | 0 | | ACGAAGGGGACTAAAACgct | tcccttctggt | CCCAAAAACGAA | ssRNA | |
| | | | ggtataatcccttctggtgtgttga | gtgttga | GGGGACTAAAAC | | |
| | | | (SEQ ID. NO: 162) | (SEQ ID. | (SEQ ID. | | |
| | | | | NO: 163) | NO: 164) | | |
| 7a | dengue_5 | LwaCas13a | GATTTAGACTACCCCAAAA | gagctggtat | GATTTAGACTAC | Dengue | 7a |
| | 1 | | ACGAAGGGGACTAAAACgag | aatcccttct | CCCAAAAACGAA | ssRNA | |
| | | | ctggtataatcccttctggtgtgtt | ggtgtgtt | GGGGACTAAAAC | | |
| | | | (SEQ ID. NO: 165) | (SEQ ID. | (SEQ ID. | | |
| | | | | NO: 166) | NO: 167) | | |
| 7a | dengue_5 | LwaCas13a | GATTTAGACTACCCCAAAA | gagagctgg | GATTTAGACTAC | Dengue | 7a |
| | 2 | | ACGAAGGGGACTAAAACgag | tataatccctt | CCCAAAAACGAA | ssRNA | |
| | | | agctggtataatcccttctggtgtg | ctggtgtg | GGGGACTAAAAC | | |
| | | | (SEQ ID. NO: 168) | (SEQ ID. | (SEQ ID. | | |
| | | | | NO: 169) | NO: 170) | | |
| 7a | dengue_5 | LwaCas13a | GATTTAGACTACCCCAAAA | aagagagct | GATTTAGACTAC | Dengue | 7a |
| | 3 | | ACGAAGGGGACTAAAACaag | ggtataatcc | CCCAAAAACGAA | ssRNA | |
| | | | agagctggtataatcccttctggtg | cttctggtg | GGGGACTAAAAC | | |
| | | | (SEQ ID. NO: 171) | (SEQ ID. | (SEQ ID. | | |
| | | | | NO: 172) | NO: 173) | | |
| 7a | dengue_5 | LwaCas13a | GATTTAGACTACCCCAAAA | caaagagag | GATTTAGACTAC | Dengue | 7a |
| | 4 | | ACGAAGGGGACTAAAACcaa | ctggtataat | CCCAAAAACGAA | ssRNA | |
| | | | agagagctggtataatcccttctgg | cccttctgg | GGGGACTAAAAC | | |
| | | | (SEQ ID. NO: 174) | (SEQ ID. | (SEQ ID. | | |
| | | | | NO: 175) | NO: 176) | | |
| 7a | dengue_5 | LwaCas13a | GATTTAGACTACCCCAAAA | ttcaaagaga | GATTTAGACTAC | Dengue | 7a |
| | 5 | | ACGAAGGGGACTAAAACttc | gctggtataa | CCCAAAAACGAA | ssRNA | |
| | | | aaagagagctggtataatcccttct | tcccttct | GGGGACTAAAAC | | |
| | | | (SEQ ID. NO: 177) | (SEQ ID. | (SEQ ID. | | |
| | | | | NO: 178) | NO: 179) | | |
| 7a | dengue_5 | LwaCas13a | GATTTAGACTACCCCAAAA | ggttcaaag | GATTTAGACTAC | Dengue | 7a |
| | 6 | | ACGAAGGGGACTAAAACggt | agagctggt | CCCAAAAACGAA | ssRNA | |
| | | | tcaaagagagctggtataatccctt | ataatccctt | GGGGACTAAAAC | | |
| | | | (SEQ ID. NO: 180) | (SEQ ID. | (SEQ ID. | | |
| | | | | NO: 181) | NO: 182) | | |
| 7a | dengue_5 | LwaCas13a | GATTTAGACTACCCCAAAA | ctggttcaaa | GATTTAGACTAC | Dengue | 7a |
| | 7 | | ACGAAGGGGACTAAAACctg | gagagctgg | CCCAAAAACGAA | ssRNA | |
| | | | gttcaaagagagctggtataatccc | tataatccc | GGGGACTAAAAC | | |
| | | | (SEQ ID. NO: 183) | (SEQ ID. | (SEQ ID. | | |
| | | | | NO: 184) | NO: 185) | | |
| 7a | dengue_5 | LwaCas13a | GATTTAGACTACCCCAAAA | ttctggttcaa | GATTTAGACTAC | Dengue | 7a |
| | 8 | | ACGAAGGGGACTAAAACttc | agagagctg | CCCAAAAACGAA | ssRNA | |
| | | | tggttcaaagagagctggtataatc | gtataatc | GGGGACTAAAAC | | |
| | | | (SEQ ID. NO: 186) | (SEQ ID. | (SEQ ID. | | |
| | | | | NO: 187) | NO: 188) | | |
| 7a | dengue_5 | LwaCas13a | GATTTAGACTACCCCAAAA | ctttctggttc | GATTTAGACTAC | Dengue | 7a |
| | 9 | | ACGAAGGGGACTAAAACctt | aaagagagc | CCCAAAAACGAA | ssRNA | |
| | | | tctggttcaaagagagctggtataa | tggtataa | GGGGACTAAAAC | | |
| | | | (SEQ ID. NO: 189) | (SEQ ID. | (SEQ ID. | | |
| | | | | NO: 190) | NO: 191) | | |
| 7a | dengue_6 | LwaCas13a | GATTTAGACTACCCCAAAA | ccctttctggt | GATTTAGACTAC | Dengue | 7a |
| | 0 | | ACGAAGGGGACTAAAACccc | tcaaagaga | CCCAAAAACGAA | ssRNA | |
| | | | tttctggttcaaagagagctggtat | gctggtat | GGGGACTAAAAC | | |
| | | | (SEQ ID. NO: 192) | (SEQ ID. | (SEQ ID. | | |
| | | | | NO: 193) | NO: 194) | | |
| 7a | dengue_6 | LwaCas13a | GATTTAGACTACCCCAAAA | ctccctttctg | GATTTAGACTAC | Dengue | 7a |
| | 1 | | ACGAAGGGGACTAAAACctc | gttcaaaga | CCCAAAAACGAA | ssRNA | |
| | | | cctttctggttcaaagagagctggt | gagctggt | GGGGACTAAAAC | | |
| | | | (SEQ ID. NO: 195) | (SEQ ID. | (SEQ ID. | | |
| | | | | NO: 196) | NO: 197) | | |
| 7a | dengue_6 | LwaCas13a | GATTTAGACTACCCCAAAA | ttctccctttc | GATTTAGACTAC | Dengue | 7a |
| | 2 | | ACGAAGGGGACTAAAACttc | tggttcaaag | CCCAAAAACGAA | ssRNA | |
| | | | tccctttctggttcaaagagagctg | agagctg | GGGGACTAAAAC | | |
| | | | (SEQ ID. NO: 198) | (SEQ ID. | (SEQ ID. | | |
| | | | | NO: 199) | NO: 200) | | |
| 7a | dengue_6 | LwaCas13a | GATTTAGACTACCCCAAAA | acttctccctt | GATTTAGACTAC | Dengue | 7a |
| | 3 | | ACGAAGGGGACTAAAACact | tctggttcaa | CCCAAAAACGAA | ssRNA | |
| | | | tctccctttctggttcaaagagagc | agagagc | GGGGACTAAAAC | | |
| | | | (SEQ ID. NO: 201) | (SEQ ID. | (SEQ ID. | | |
| | | | | NO: 202) | NO: 203) | | |
| 7a | dengue_6 | LwaCas13a | GATTTAGACTACCCCAAAA | tgacttctcc | GATTTAGACTAC | Dengue | 7a |
| | 4 | | ACGAAGGGGACTAAAACtga | ctttctggttc | CCCAAAAACGAA | ssRNA | |
| | | | cttctccctttctggttcaaagaga | aaagaga | GGGGACTAAAAC | | |
| | | | (SEQ ID. NO: 204) | (SEQ ID. | (SEQ ID. | | |
| | | | | NO: 205) | NO: 206) | | |
| 7a | dengue_6 | LwaCas13a | GATTTAGACTACCCCAAAA | ctgacttctc | GATTTAGACTAC | Dengue | 7a |
| | 5 | | ACGAAGGGGACTAAAACctg | cctttctggtt | CCCAAAAACGAA | ssRNA | |
| | | | acttctccctttctggttcaaagag | caaagag | GGGGACTAAAAC | | |
| | | | (SEQ ID. NO: 207) | (SEQ ID. | (SEQ ID. | | |
| | | | | NO: 208) | NO: 209) | | |
| 7a | dengue_6 | LwaCas13a | GATTTAGACTACCCCAAAA | gctgacttct | GATTTAGACTAC | Dengue | 7a |
| | 6 | | ACGAAGGGGACTAAAACgct | ccctttctggt | CCCAAAAACGAA | ssRNA | |
| | | | gacttctccctttctggttcaaaga | tcaaaga | GGGGACTAAAAC | | |
| | | | (SEQ ID. NO: 210) | (SEQ ID. | (SEQ ID. | | |
| | | | | NO: 211) | NO: 212) | | |
| 7a | dengue_6 | LwaCas13a | GATTTAGACTACCCCAAAA | ggctgacttc | GATTTAGACTAC | Dengue | 7a |
| | 7 | | ACGAAGGGGACTAAAACggc | tccctttctgg | CCCAAAAACGAA | ssRNA | |
| | | | tgacttctccctttctggttcaaag | ttcaaag | GGGGACTAAAAC | | |
| | | | (SEQ ID. NO: 213) | (SEQ ID. | (SEQ ID. | | |
| | | | | NO: 214) | NO: 215) | | |
| 7a | dengue_6 | LwaCas13a | GATTTAGACTACCCCAAAA | cggctgactt | GATTTAGACTAC | Dengue | 7a |
| | 8 | | ACGAAGGGGACTAAAACcgg | ctccctttctg | CCCAAAAACGAA | ssRNA | |
| | | | ctgacttctccctttctggttcaaa | gttcaaa | GGGGACTAAAAC | | |
| | | | (SEQ ID. NO: 216) | (SEQ ID. | (SEQ ID. | | |
| | | | | NO: 217) | NO: 218) | | |
| 7a | dengue_6 | LwaCas13a | GATTTAGACTACCCCAAAA | gcggctgac | GATTTAGACTAC | Dengue | 7a |
| | 9 | | ACGAAGGGGACTAAAACgcg | ttctccctttc | CCCAAAAACGAA | ssRNA | |
| | | | gctgacttctccctttctggttcaa | tggttcaa | GGGGACTAAAAC | | |
| | | | (SEQ ID. NO: 219) | (SEQ ID. | (SEQ ID. | | |
| | | | | NO: 220) | NO: 221) | | |
| 7a | dengue_7 | LwaCas13a | GATTTAGACTACCCCAAAA | ggcggctga | GATTTAGACTAC | Dengue | 7a |
| | 0 | | ACGAAGGGGACTAAAACggc | cttctcccttt | CCCAAAAACGAA | ssRNA | |
| | | | ggctgacttctccctttctggttca | ctggttca | GGGGACTAAAAC | | |
| | | | (SEQ ID. NO: 222) | (SEQ ID. | (SEQ ID. | | |
| | | | | NO: 223) | NO: 224) | | |
| 7a | dengue_7 | LwaCas13a | GATTTAGACTACCCCAAAA | tggcggctg | GATTTAGACTAC | Dengue | 7a |
| | 1 | | ACGAAGGGGACTAAAACtgg | acttctccctt | CCCAAAAACGAA | ssRNA | |
| | | | cggctgacttctccctttctggttc | tctggttc | GGGGACTAAAAC | | |
| | | | (SEQ ID. NO: 225) | (SEQ ID. | (SEQ ID. | | |
| | | | | NO: 226) | NO: 227) | | |
| 7a | dengue_7 | LwaCas13a | GATTTAGACTACCCCAAAA | atggcggct | GATTTAGACTAC | Dengue | 7a |
| | 2 | | ACGAAGGGGACTAAAACatg | gacttctccc | CCCAAAAACGAA | ssRNA | |
| | | | gcggctgacttctccctttctggtt | tttctggtt | GGGGACTAAAAC | | |
| | | | (SEQ ID. NO: 228) | (SEQ ID. | (SEQ ID. | | |
| | | | | NO: 229) | NO: 230) | | |
| 7a | dengue_7 | LwaCas13a | GATTTAGACTACCCCAAAA | tatggcggct | GATTTAGACTAC | Dengue | 7a |
| | 3 | | ACGAAGGGGACTAAAACtat | gacttctccc | CCCAAAAACGAA | ssRNA | |
| | | | ggcggctgacttctccctttctggt | tttctggt | GGGGACTAAAAC | | |
| | | | (SEQ ID. NO: 231) | (SEQ ID. | (SEQ ID. | | |
| | | | | NO: 232) | NO: 233) | | |
| 7a | dengue_7 | LwaCas13a | GATTTAGACTACCCCAAAA | ctatggcgg | GATTTAGACTAC | Dengue | 7a |
| | 4 | | ACGAAGGGGACTAAAACcta | ctgacttctc | CCCAAAAACGAA | ssRNA | |
| | | | tggcggctgacttctccctttctgg | cctttctgg | GGGGACTAAAAC | | |
| | | | (SEQ ID. NO: 234) | (SEQ ID. | (SEQ ID. | | |
| | | | | NO: 235) | NO: 236) | | |
| 7a | dengue_7 | LwaCas13a | GATTTAGACTACCCCAAAA | tctatggcgg | GATTTAGACTAC | Dengue | 7a |
| | 5 | | ACGAAGGGGACTAAAACtct | ctgacttctc | CCCAAAAACGAA | ssRNA | |
| | | | atggcggctgacttctccctttctg | cctttctg | GGGGACTAAAAC | | |
| | | | (SEQ ID. NO: 237) | (SEQ ID. | (SEQ ID. | | |
| | | | | NO: 238) | NO: 239) | | |
| 7a | dengue_7 | LwaCas13a | GATTTAGACTACCCCAAAA | gtctatggcg | GATTTAGACTAC | Dengue | 7a |
| | 6 | | ACGAAGGGGACTAAAACgtc | gctgacttct | CCCAAAAACGAA | ssRNA | |
| | | | tatggcggctgacttctccctttct | ccctttct | GGGGACTAAAAC | | |
| | | | (SEQ ID. NO: 240) | (SEQ ID. | (SEQ ID. | | |
| | | | | NO: 241) | NO: 242) | | |
| 7a | dengue_7 | LwaCas13a | GATTTAGACTACCCCAAAA | cgtctatggc | GATTTAGACTAC | Dengue | 7a |
| | 7 | | ACGAAGGGGACTAAAACcgt | ggctgacttc | CCCAAAAACGAA | ssRNA | |
| | | | ctatggcggctgacttctccctttc | tccctttc | GGGGACTAAAAC | | |
| | | | (SEQ ID. NO: 243) | (SEQ ID. | (SEQ ID. | | |
| | | | | NO: 244) | NO: 245) | | |
| 7a | dengue_7 | LwaCas13a | GATTTAGACTACCCCAAAA | ccgtctatgg | GATTTAGACTAC | Dengue | 7a |
| | 8 | | ACGAAGGGGACTAAAACccg | cggctgactt | CCCAAAAACGAA | ssRNA | |
| | | | tctatggcggctgacttctcccttt | ctcccttt | GGGGACTAAAAC | | |
| | | | (SEQ ID. NO: 246) | (SEQ ID. | (SEQ ID. | | |
| | | | | NO: 247) | NO: 248) | | |
| 7a | dengue_7 | LwaCas13a | GATTTAGACTACCCCAAAA | accgtctatg | GATTTAGACTAC | Dengue | 7a |
| | 9 | | ACGAAGGGGACTAAAACacc | gcggctgac | CCCAAAAACGAA | ssRNA | |
| | | | gtctatggcggctgacttctccctt | ttctccctt | GGGGACTAAAAC | | |
| | | | (SEQ ID. NO: 249) | (SEQ ID. | (SEQ ID. | | |
| | | | | NO: 250) | NO: 251) | | |
| 7a | dengue_8 | LwaCas13a | GATTTAGACTACCCCAAAA | caccgtctat | GATTTAGACTAC | Dengue | 7a |
| | 0 | | ACGAAGGGGACTAAAACcac | ggcggctga | CCCAAAAACGAA | ssRNA | |
| | | | cgtctatggcggctgacttctccct | cttctccct | GGGGACTAAAAC | | |
| | | | (SEQ ID. NO: 252) | (SEQ ID. | (SEQ ID. | | |
| | | | | NO: 253) | NO: 254) | | |
| 7a | dengue_8 | LwaCas13a | GATTTAGACTACCCCAAAA | tcaccgtcta | GATTTAGACTAC | Dengue | 7a |
| | 1 | | ACGAAGGGGACTAAAACtca | tggcggctg | CCCAAAAACGAA | ssRNA | |
| | | | ccgtctatggcggctgacttctccc | acttctccc | GGGGACTAAAAC | | |
| | | | (SEQ ID. NO: 255) | (SEQ ID. | (SEQ ID. | | |
| | | | | NO: 256) | NO: 257) | | |
| 7a | dengue_8 | LwaCas13a | GATTTAGACTACCCCAAAA | ttcaccgtct | GATTTAGACTAC | Dengue | 7a |
| | 2 | | ACGAAGGGGACTAAAACttc | atggcggct | CCCAAAAACGAA | ssRNA | |
| | | | accgtctatggcggctgacttctcc | gacttctcc | GGGGACTAAAAC | | |
| | | | (SEQ ID. NO: 258) | (SEQ ID. | (SEQ ID. | | |
| | | | | NO: 259) | NO: 260) | | |
| 7a | dengue_8 | LwaCas13a | GATTTAGACTACCCCAAAA | attcaccgtc | GATTTAGACTAC | Dengue | 7a |
| | 3 | | ACGAAGGGGACTAAAACatt | tatggcggct | CCCAAAAACGAA | ssRNA | |
| | | | caccgtctatggcggctgacttctc | gacttctc | GGGGACTAAAAC | | |
| | | | (SEQ ID. NO: 261) | (SEQ ID. | (SEQ ID. | | |
| | | | | NO: 262) | NO: 263) | | |
| 7a | dengue_8 | LwaCas13a | GATTTAGACTACCCCAAAA | tattcaccgt | GATTTAGACTAC | Dengue | 7a |
| | 4 | | ACGAAGGGGACTAAAACtat | ctatggcgg | CCCAAAAACGAA | ssRNA | |
| | | | tcaccgtctatggcggctgacttct | ctgacttct | GGGGACTAAAAC | | |
| | | | (SEQ ID. NO: 264) | (SEQ ID. | (SEQ ID. | | |
| | | | | NO: 265) | NO: 266) | | |
| 7a | dengue_8 | LwaCas13a | GATTTAGACTACCCCAAAA | gtattcaccg | GATTTAGACTAC | Dengue | 7a |
| | 5 | | ACGAAGGGGACTAAAACgta | tctatggcgg | CCCAAAAACGAA | ssRNA | |
| | | | ttcaccgtctatggeggctgacttc | ctgacttc | GGGGACTAAAAC | | |
| | | | (SEQ ID. NO: 267) | (SEQ ID. | (SEQ ID. | | |
| | | | | NO: 268) | NO: 269) | | |
| 7a | dengue_8 | LwaCas13a | GATTTAGACTACCCCAAAA | ggtattcacc | GATTTAGACTAC | Dengue | 7a |
| | 6 | | ACGAAGGGGACTAAAACggt | gtctatggcg | CCCAAAAACGAA | ssRNA | |
| | | | attcaccgtctatggcggctgactt | gctgactt | GGGGACTAAAAC | | |
| | | | (SEQ ID. NO: 270) | (SEQ ID. | (SEQ ID. | | |
| | | | | NO: 271) | NO: 272) | | |
| 7a | dengue_8 | LwaCas13a | GATTTAGACTACCCCAAAA | cggtattcac | GATTTAGACTAC | Dengue | 7a |
| | 7 | | ACGAAGGGGACTAAAACcgg | cgtctatggc | CCCAAAAACGAA | ssRNA | |
| | | | tattcaccgtctatggcggctgact | ggctgact | GGGGACTAAAAC | | |
| | | | (SEQ ID. NO: 273) | (SEQ ID. | (SEQ ID. | | |
| | | | | NO: 274) | NO: 275) | | |
| 7a | dengue_8 | LwaCas13a | GATTTAGACTACCCCAAAA | geggtattca | GATTTAGACTAC | Dengue | 7a |
| | 8 | | ACGAAGGGGACTAAAACgcg | ccgtctatgg | CCCAAAAACGAA | ssRNA | |
| | | | gtattcaccgtctatggcggctgac | cggctgac | GGGGACTAAAAC | | |
| | | | (SEQ ID. NO: 276) | (SEQ ID. | (SEQ ID. | | |
| | | | | NO: 277) | NO: 278) | | |
| 7a | dengue_8 | LwaCas13a | GATTTAGACTACCCCAAAA | ggcggtattc | GATTTAGACTAC | Dengue | 7a |
| | 9 | | ACGAAGGGGACTAAAACggc | accgtctatg | CCCAAAAACGAA | ssRNA | |
| | | | ggtattcaccgtctatggcggctga | gcggctga | GGGGACTAAAAC | | |
| | | | (SEQ ID. NO: 279) | (SEQ ID. | (SEQ ID. | | |
| | | | | NO: 280) | NO: 281) | | |
| 7a | dengue_9 | LwaCas13a | GATTTAGACTACCCCAAAA | aggcggtatt | GATTTAGACTAC | Dengue | 7a |
| | 0 | | ACGAAGGGGACTAAAACagg | caccgtctat | CCCAAAAACGAA | ssRNA | |
| | | | cggtattcaccgtctatggcggctg | ggcggctg | GGGGACTAAAAC | | |
| | | | (SEQ ID. NO: 282) | (SEQ ID. | (SEQ ID. | | |
| | | | | NO: 283) | NO: 284) | | |
| 7a | dengue_9 | LwaCas13a | GATTTAGACTACCCCAAAA | caggcggta | GATTTAGACTAC | Dengue | 7a |
| | 1 | | ACGAAGGGGACTAAAACcag | ttcaccgtct | CCCAAAAACGAA | ssRNA | |
| | | | gcggtattcaccgtctatggcggct | atggcggct | GGGGACTAAAAC | | |
| | | | (SEQ ID. NO: 285) | (SEQ ID. | (SEQ ID. | | |
| | | | | NO: 286) | NO: 287) | | |
| 7a | dengue_9 | LwaCas13a | GATTTAGACTACCCCAAAA | tcaggcggt | GATTTAGACTAC | Dengue | 7a |
| | 2 | | ACGAAGGGGACTAAAACtca | attcaccgtc | CCCAAAAACGAA | ssRNA | |
| | | | ggcggtattcaccgtctatggcggc | tatggcggc | GGGGACTAAAAC | | |
| | | | (SEQ ID. NO: 288) | (SEQ ID. | (SEQ ID. | | |
| | | | | NO: 289) | NO: 290) | | |
| 7a | dengue_9 | LwaCas13a | GATTTAGACTACCCCAAAA | ttcaggcggt | GATTTAGACTAC | Dengue | 7a |
| | 3 | | ACGAAGGGGACTAAAACttc | attcaccgtc | CCCAAAAACGAA | ssRNA | |
| | | | aggcggtattcaccgtctatggcgg | tatggcgg | GGGGACTAAAAC | | |
| | | | (SEQ ID. NO: 291) | (SEQ ID. | (SEQ ID. | | |
| | | | | NO: 292) | NO: 293) | | |
| 7a | dengue_9 | LwaCas13a | GATTTAGACTACCCCAAAA | cttcaggcg | GATTTAGACTAC | Dengue | 7a |
| | 4 | | ACGAAGGGGACTAAAACctt | gtattcaccg | CCCAAAAACGAA | ssRNA | |
| | | | caggcggtattcaccgtctatggcg | tctatggcg | GGGGACTAAAAC | | |
| | | | (SEQ ID. NO: 294) | (SEQ ID. | (SEQ ID. | | |
| | | | | NO: 295) | NO: 296) | | |
| 7a | dengue_9 | LwaCas13a | GATTTAGACTACCCCAAAA | ccttcaggc | GATTTAGACTAC | Dengue | 7a |
| | 5 | | ACGAAGGGGACTAAAACcct | ggtattcacc | CCCAAAAACGAA | ssRNA | |
| | | | tcaggcggtattcaccgtctatggc | gtctatggc | GGGGACTAAAAC | | |
| | | | (SEQ ID. NO: 297) | (SEQ ID. | (SEQ ID. | | |
| | | | | NO: 298) | NO: 299) | | |
| 1b | Ebola_GP | LwaCas13a | GATTTAGACTACCCCAAAA | ctgtgaaag | GATTTAGACTAC | Ebola | 1b |
| | _guide_01 | | ACGAAGGGGACTAAAACctg | acaactcttc | CCCAAAAACGAA | ssRNA | |
| | | | tgaaagacaactcttcactgcgaat | actgcgaat | GGGGACTAAAAC | | |
| | | | (SEQ ID. NO: 300) | (SEQ ID. | (SEQ ID. | | |
| | | | | NO: 301) | NO: 302) | | |
| 1b | Ebola_GP | LwaCas13a | GATTTAGACTACCCCAAAA | gatacaactg | GATTTAGACTAC | Ebola | 1b |
| | _guide_06 | | ACGAAGGGGACTAAAACgat | tgaaagaca | CCCAAAAACGAA | ssRNA | |
| | | | acaactgtgaaagacaactcttcac | actcttcac | GGGGACTAAAAC | | |
| | | | (SEQ ID. NO: 303) | (SEQ ID. | (SEQ ID. | | |
| | | | | NO: 304) | NO: 305) | | |
| 1b | Ebola_GP | LwaCas13a | GATTTAGACTACCCCAAAA | tgatacaact | GATTTAGACTAC | Ebola | 1b |
| | _guide_07 | | ACGAAGGGGACTAAAACtga | gtgaaagac | CCCAAAAACGAA | ssRNA | |
| | | | tacaactgtgaaagacaactcttca | aactcttca | GGGGACTAAAAC | | |
| | | | (SEQ ID. NO: 306) | (SEQ ID. | (SEQ ID. | | |
| | | | | NO: 307) | NO: 308) | | |
| 1b | Ebola_GP | LwaCas13a | GATTTAGACTACCCCAAAA | tttgatacaa | GATTTAGACTAC | Ebola | 1b |
| | _guide_08 | | ACGAAGGGGACTAAAACttt | ctgtgaaag | CCCAAAAACGAA | ssRNA | |
| | | | gatacaactgtgaaagacaactctt | acaactctt | GGGGACTAAAAC | | |
| | | | (SEQ ID. NO: 309) | (SEQ ID. | (SEQ ID. | | |
| | | | | NO: 310) | NO: 311) | | |
| 1b | Ebola_GP | LwaCas13a | GATTTAGACTACCCCAAAA | tccgtttgata | GATTTAGACTAC | Ebola | 1b |
| | _guide_11 | | ACGAAGGGGACTAAAACtcc | caactgtgaa | CCCAAAAACGAA | ssRNA | |
| | | | gtttgatacaactgtgaaagacaac | agacaac | GGGGACTAAAAC | | |
| | | | (SEQ ID. NO: 312) | (SEQ ID. | (SEQ ID. | | |
| | | | | NO: 313) | NO: 314) | | |
| 1b | Ebola_GP | LwaCas13a | GATTTAGACTACCCCAAAA | ggctccgttt | GATTTAGACTAC | Ebola | 1b |
| | _guide_13 | | ACGAAGGGGACTAAAACggc | gatacaactg | CCCAAAAACGAA | ssRNA | |
| | | | tccgtttgatacaactgtgaaagac | tgaaagac | GGGGACTAAAAC | | |
| | | | (SEQ ID. NO: 315) | (SEQ ID. | (SEQ ID. | | |
| | | | | NO: 316) | NO: 317) | | |
| 1b | Ebola_GP | LwaCas13a | GATTTAGACTACCCCAAAA | ccactgatgt | GATTTAGACTAC | Ebola | 1b |
| | _guide_20 | | ACGAAGGGGACTAAAACcca | ttttggctccg | CCCAAAAACGAA | ssRNA | |
| | | | ctgatgtttttggctccgtttgata | tttgata | GGGGACTAAAAC | | |
| | | | (SEQ ID. NO: 318) | (SEQ ID. | (SEQ ID. | | |
| | | | | NO: 319) | NO: 320) | | |
| 1b | Ebola_GP | LwaCas13a | GATTTAGACTACCCCAAAA | accactgatg | GATTTAGACTAC | Ebola | 1b |
| | _guide_21 | | ACGAAGGGGACTAAAACacc | tttttggctcc | CCCAAAAACGAA | ssRNA | |
| | | | actgatgtttttggctccgtttgat | gtttgat | GGGGACTAAAAC | | |
| | | | (SEQ ID. NO: 321) | (SEQ ID. | (SEQ ID. | | |
| | | | | NO: 322) | NO: 323) | | |
| 1b | Ebola_GP | LwaCas13a | GATTTAGACTACCCCAAAA | gaccactgat | GATTTAGACTAC | Ebola | 1b |
| | _guide_22 | | ACGAAGGGGACTAAAACgac | gtttttggctc | CCCAAAAACGAA | ssRNA | |
| | | | cactgatgtttttggctccgtttga | cgtttga | GGGGACTAAAAC | | |
| | | | (SEQ ID. NO: 324) | (SEQ ID. | (SEQ ID. | | |
| | | | | NO: 325) | NO: 326) | | |
| 1b | Ebola_GP | LwaCas13a | GATTTAGACTACCCCAAAA | ctgaccactg | GATTTAGACTAC | Ebola | 1b |
| | _guide_23 | | ACGAAGGGGACTAAAACctg | atgtttttggc | CCCAAAAACGAA | ssRNA | |
| | | | accactgatgtttttggctccgttt | tccgttt | GGGGACTAAAAC | | |
| | | | (SEQ ID. NO: 327) | (SEQ ID. | (SEQ ID. | | |
| | | | | NO: 328) | NO: 329) | | |
| 1b | Ebola_GP | LwaCas13a | GATTTAGACTACCCCAAAA | ctctgaccac | GATTTAGACTAC | Ebola | 1b |
| | _guide_25 | | ACGAAGGGGACTAAAACctc | tgatgtttttg | CCCAAAAACGAA | ssRNA | |
| | | | tgaccactgatgtttttggctccgt | gctccgt | GGGGACTAAAAC | | |
| | | | (SEQ ID. NO: 330) | (SEQ ID. | (SEQ ID. | | |
| | | | | NO: 331) | NO: 332) | | |
| 1b | Ebola_GP | LwaCas13a | GATTTAGACTACCCCAAAA | cgccggact | GATTTAGACTAC | Ebola | 1b |
| | _guide_30 | | ACGAAGGGGACTAAAACcgc | ctgaccactg | CCCAAAAACGAA | ssRNA | |
| | | | cggactctgaccactgatgtttttg | atgtttttg | GGGGACTAAAAC | | |
| | | | (SEQ ID. NO: 333) | (SEQ ID. | (SEQ ID. | | |
| | | | | NO: 334) | NO: 335) | | |
| 1b | Ebola_GP | LwaCas13a | GATTTAGACTACCCCAAAA | cgcgccgga | GATTTAGACTAC | Ebola | 1b |
| | _guide_31 | | ACGAAGGGGACTAAAACcgc | ctctgaccac | CCCAAAAACGAA | ssRNA | |
| | | | gccggactctgaccactgatgtttt | tgatgtttt | GGGGACTAAAAC | | |
| | | | (SEQ ID. NO: 336) | (SEQ ID. | (SEQ ID. | | |
| | | | | NO: 337) | NO: 338) | | |
| 1b | Ebola_GP | LwaCas13a | GATTTAGACTACCCCAAAA | ttcgcgccg | GATTTAGACTAC | Ebola | 1b |
| | _guide_32 | | ACGAAGGGGACTAAAACttc | gactctgacc | CCCAAAAACGAA | ssRNA | |
| | | | gegccggactctgaccactgatgtt | actgatgtt | GGGGACTAAAAC | | |
| | | | (SEQ ID. NO: 339) | (SEQ ID. | (SEQ ID. | | |
| | | | | NO: 340) | NO: 341) | | |
| 1b | Ebola_GP | LwaCas13a | GATTTAGACTACCCCAAAA | gttcgcgcc | GATTTAGACTAC | Ebola | 1b |
| | _guide_33 | | ACGAAGGGGACTAAAACgtt | ggactctga | CCCAAAAACGAA | ssRNA | |
| | | | cgcgccggactctgaccactgatgt | ccactgatgt | GGGGACTAAAAC | | |
| | | | (SEQ ID. NO: 342) | (SEQ ID. | (SEQ ID. | | |
| | | | | NO: 343) | NO: 344) | | |
| 1b | Ebola_GP | LwaCas13a | GATTTAGACTACCCCAAAA | agttcgcgc | GATTTAGACTAC | Ebola | 1b |
| | _guide_34 | | ACGAAGGGGACTAAAACagt | cggactctg | CCCAAAAACGAA | ssRNA | |
| | | | tcgcgccggactctgaccactgatg | accactgatg | GGGGACTAAAAC | | |
| | | | (SEQ ID. NO: 345) | (SEQ ID. | (SEQ ID. | | |
| | | | | NO: 346) | NO: 347) | | |
| 1b | Ebola_GP | LwaCas13a | GATTTAGACTACCCCAAAA | aagttcgcg | GATTTAGACTAC | Ebola | 1b |
| | _guide_35 | | ACGAAGGGGACTAAAACaag | ccggactct | CCCAAAAACGAA | ssRNA | |
| | | | ttcgcgccggactctgaccactgat | gaccactgat | GGGGACTAAAAC | | |
| | | | (SEQ ID. NO: 348) | (SEQ ID. | (SEQ ID. | | |
| | | | | NO: 349) | NO: 350) | | |
| 1b | Ebola_GP | LwaCas13a | GATTTAGACTACCCCAAAA | agaagttcg | GATTTAGACTAC | Ebola | 1b |
| | _guide_36 | | ACGAAGGGGACTAAAACaga | cgccggact | CCCAAAAACGAA | ssRNA | |
| | | | agttcgcgccggactctgaccactg | ctgaccactg | GGGGACTAAAAC | | |
| | | | (SEQ ID. NO: 351) | (SEQ ID. | (SEQ ID. | | |
| | | | | NO: 352) | NO: 353) | | |
| 1b | Ebola_GP | LwaCas13a | GATTTAGACTACCCCAAAA | ggtcggaag | GATTTAGACTAC | Ebola | 1b |
| | _guide_42 | | ACGAAGGGGACTAAAACggt | aagttcgcg | CCCAAAAACGAA | ssRNA | |
| | | | cggaagaagttcgcgccggactctg | ccggactct | GGGGACTAAAAC | | |
| | | | (SEQ ID. NO: 354) | g (SEQ | (SEQ ID. | | |
| | | | | ID. NO: | NO: 356) | | |
| | | | | 355) | | | |
| 1b | Ebola_GP | LwaCas13a | GATTTAGACTACCCCAAAA | ctgggtcgg | GATTTAGACTAC | Ebola | 1b |
| | _guide_43 | | ACGAAGGGGACTAAAACctg | aagaagttc | CCCAAAAACGAA | ssRNA | |
| | | | ggtcggaagaagttcgcgccggact | gcgccggac | GGGGACTAAAAC | | |
| | | | (SEQ ID. NO: 357) | t (SEQ | (SEQ ID. | | |
| | | | | ID. NO: | NO: 359) | | |
| | | | | 358) | | | |
| 1b | Ebola_GP | LwaCas13a | GATTTAGACTACCCCAAAA | cctgggtcg | GATTTAGACTAC | Ebola | 1b |
| | _guide_44 | | ACGAAGGGGACTAAAACcct | gaagaagtt | CCCAAAAACGAA | ssRNA | |
| | | | gggtcggaagaagttcgcgccggac | cgcgccgga | GGGGACTAAAAC | | |
| | | | (SEQ ID. NO: 360) | c (SEQ | (SEQ ID. | | |
| | | | | ID. NO: | NO: 362) | | |
| | | | | 361) | | | |
| 1b | Ebola_GP | LwaCas13a | GATTTAGACTACCCCAAAA | ccctgggtc | GATTTAGACTAC | Ebola | 1b |
| | _guide_45 | | ACGAAGGGGACTAAAACccc | ggaagaagt | CCCAAAAACGAA | ssRNA | |
| | | | tgggtcggaagaagttcgcgccgga | tcgcgccgg | GGGGACTAAAAC | | |
| | | | (SEQ ID. NO: 363) | a (SEQ | (SEQ ID. | | |
| | | | | ID. NO: | NO: 365) | | |
| | | | | 364) | | | |
| 1b | Ebola_GP | LwaCas13a | GATTTAGACTACCCCAAAA | tccctgggtc | GATTTAGACTAC | Ebola | 1b |
| | _guide_46 | | ACGAAGGGGACTAAAACtcc | ggaagaagt | CCCAAAAACGAA | ssRNA | |
| | | | ctgggtcggaagaagttcgcgccgg | tcgcgccgg | GGGGACTAAAAC | | |
| | | | (SEQ ID. NO: 366) | (SEQ ID. | (SEQ ID. | | |
| | | | | NO: 367) | NO: 368) | | |
| 1b | Ebola_GP | LwaCas13a | GATTTAGACTACCCCAAAA | ggtccctgg | GATTTAGACTAC | Ebola | 1b |
| | _guide_48 | | ACGAAGGGGACTAAAACggt | gtcggaaga | CCCAAAAACGAA | ssRNA | |
| | | | ccctgggtcggaagaagttcgcgcc | agttcgcgc | GGGGACTAAAAC | | |
| | | | (SEQ ID. NO: 369) | c (SEQ | (SEQ ID. | | |
| | | | | ID. NO: | NO: 371) | | |
| | | | | 370) | | | |
| 1b | Ebola_GP | LwaCas13a | GATTTAGACTACCCCAAAA | gttggtccct | GATTTAGACTAC | Ebola | 1b |
| | _guide_49 | | ACGAAGGGGACTAAAACgtt | gggtcggaa | CCCAAAAACGAA | ssRNA | |
| | | | ggtccctgggtcggaagaagttcgc | gaagttcgc | GGGGACTAAAAC | | |
| | | | (SEQ ID. NO: 372) | (SEQ ID. | (SEQ ID. | | |
| | | | | NO: 373) | NO: 374) | | |
| 1b | Ebola_GP | LwaCas13a | GATTTAGACTACCCCAAAA | agttgttgtgt | GATTTAGACTAC | Ebola | 1b |
| | _guide_55 | | ACGAAGGGGACTAAAACagt | tggtccctgg | CCCAAAAACGAA | ssRNA | |
| | | | tgttgtgttggtccctgggtcggaa | gtcggaa | GGGGACTAAAAC | | |
| | | | (SEQ ID. NO: 375) | (SEQ ID. | (SEQ ID. | | |
| | | | | NO: 376) | NO: 377) | | |
| 1b | Ebola_GP | LwaCas13a | GATTTAGACTACCCCAAAA | tcagttgttgt | GATTTAGACTAC | Ebola | 1b |
| | _guide_57 | | ACGAAGGGGACTAAAACtca | gttggtccct | CCCAAAAACGAA | ssRNA | |
| | | | gttgttgtgttggtccctgggtcgg | gggtcgg | GGGGACTAAAAC | | |
| | | | (SEQ ID. NO: 378) | (SEQ ID. | (SEQ ID. | | |
| | | | | NO: 379) | NO: 380) | | |
| 1b | Ebola_GP | LwaCas13a | GATTTAGACTACCCCAAAA | ttcagttgttg | GATTTAGACTAC | Ebola | 1b |
| | _guide_58 | | ACGAAGGGGACTAAAACttc | tgttggtccct | CCCAAAAACGAA | ssRNA | |
| | | | agttgttgtgttggtccctgggtcg | gggtcg | GGGGACTAAAAC | | |
| | | | (SEQ ID. NO: 381) | (SEQ ID. | (SEQ ID. | | |
| | | | | NO: 382) | NO: 383) | | |
| 1b | Ebola_GP | LwaCas13a | GATTTAGACTACCCCAAAA | cttcagttgtt | GATTTAGACTAC | Ebola | 1b |
| | _guide_59 | | ACGAAGGGGACTAAAACctt | gtgttggtcc | CCCAAAAACGAA | ssRNA | |
| | | | cagttgttgtgttggtccctgggtc | ctgggtc | GGGGACTAAAAC | | |
| | | | (SEQ ID. NO: 384) | (SEQ ID. | (SEQ ID. | | |
| | | | | NO: 385) | NO: 386) | | |
| 1b | Ebola_GP | LwaCas13a | GATTTAGACTACCCCAAAA | tcttcagttgt | GATTTAGACTAC | Ebola | 1b |
| | _guide_60 | | ACGAAGGGGACTAAAACtct | tgtgttggtc | CCCAAAAACGAA | ssRNA | |
| | | | tcagttgttgtgttggtccctgggt | cctgggt | GGGGACTAAAAC | | |
| | | | (SEQ ID. NO: 387) | (SEQ ID. | (SEQ ID. | | |
| | | | | NO: 388) | NO: 389) | | |
| 1b | Ebola_GP | LwaCas13a | GATTTAGACTACCCCAAAA | tggtcttcagt | GATTTAGACTAC | Ebola | 1b |
| | _guide_61 | | ACGAAGGGGACTAAAACtgg | tgttgtgttgg | CCCAAAAACGAA | ssRNA | |
| | | | tcttcagttgttgtgttggtccctg | tccctg | GGGGACTAAAAC | | |
| | | | (SEQ ID. NO: 390) | (SEQ ID. | (SEQ ID. | | |
| | | | | NO: 391) | NO: 392) | | |
| 1b | Ebola_GP | LwaCas13a | GATTTAGACTACCCCAAAA | attttgtggtc | GATTTAGACTAC | Ebola | 1b |
| | _guide_66 | | ACGAAGGGGACTAAAACatt | ttcagttgttg | CCCAAAAACGAA | ssRNA | |
| | | | ttgtggtcttcagttgttgtgttgg | tgttgg | GGGGACTAAAAC | | |
| | | | (SEQ ID. NO: 393) | (SEQ ID. | (SEQ ID. | | |
| | | | | NO: 394) | NO: 395) | | |
| 1b | Ebola_GP | LwaCas13a | GATTTAGACTACCCCAAAA | gccatgatttt | GATTTAGACTAC | Ebola | 1b |
| | _guide_70 | | ACGAAGGGGACTAAAACgcc | gtggtcttca | CCCAAAAACGAA | ssRNA | |
| | | | atgattttgtggtcttcagttgttg | gttgttg | GGGGACTAAAAC | | |
| | | | (SEQ ID. NO: 396) | (SEQ ID. | (SEQ ID. | | |
| | | | | NO: 397) | NO: 398) | | |
| 1b | Ebola_GP | LwaCas13a | GATTTAGACTACCCCAAAA | aagccatgat | GATTTAGACTAC | Ebola | 1b |
| | _guide_72 | | ACGAAGGGGACTAAAACaag | tttgtggtctt | CCCAAAAACGAA | ssRNA | |
| | | | ccatgattttgtggtcttcagttgt | cagttgt | GGGGACTAAAAC | | |
| | | | (SEQ ID. NO: 399) | (SEQ ID. | (SEQ ID. | | |
| | | | | NO: 400) | NO: 401) | | |
| 1b | Ebola_GP | LwaCas13a | GATTTAGACTACCCCAAAA | ctgaagccat | GATTTAGACTAC | Ebola | 1b |
| | _guide_73 | | ACGAAGGGGACTAAAACctg | gattttgtggt | CCCAAAAACGAA | ssRNA | |
| | | | aagccatgattttgtggtcttcagt | cttcagt | GGGGACTAAAAC | | |
| | | | (SEQ ID. NO: 402) | (SEQ ID. | (SEQ ID. | | |
| | | | | NO: 403) | NO: 404) | | |
| 1b | Ebola_GP | LwaCas13a | GATTTAGACTACCCCAAAA | gaattttctga | GATTTAGACTAC | Ebola | 1b |
| | _guide_78 | | ACGAAGGGGACTAAAACgaa | agccatgatt | CCCAAAAACGAA | ssRNA | |
| | | | ttttctgaagccatgattttgtggt | ttgtggt | GGGGACTAAAAC | | |
| | | | (SEQ ID. NO: 405) | (SEQ ID. | (SEQ ID. | | |
| | | | | NO: 406) | NO: 407) | | |
| 1b | Ebola_GP | LwaCas13a | GATTTAGACTACCCCAAAA | agaggaattt | GATTTAGACTAC | Ebola | 1b |
| | _guide_81 | | ACGAAGGGGACTAAAACaga | tctgaagcca | CCCAAAAACGAA | ssRNA | |
| | | | ggaattttctgaagccatgattttg | tgattttg | GGGGACTAAAAC | | |
| | | | (SEQ ID. NO: 408) | (SEQ ID. | (SEQ ID. | | |
| | | | | NO: 409) | NO: 410) | | |
| 1b | Ebola_GP | LwaCas13a | GATTTAGACTACCCCAAAA | cagaggaat | GATTTAGACTAC | Ebola | 1b |
| | _guide_82 | | ACGAAGGGGACTAAAACcag | tttctgaagc | CCCAAAAACGAA | ssRNA | |
| | | | aggaattttctgaagccatgatttt | catgatttt | GGGGACTAAAAC | | |
| | | | (SEQ ID. NO: 411) | (SEQ ID. | (SEQ ID. | | |
| | | | | NO: 412) | NO: 413) | | |
| 1b | Ebola_GP | LwaCas13a | GATTTAGACTACCCCAAAA | cattgcaga | GATTTAGACTAC | Ebola | 1b |
| | _guide_85 | | ACGAAGGGGACTAAAACcat | ggaattttctg | CCCAAAAACGAA | ssRNA | |
| | | | tgcagaggaattttctgaagccatg | aagccatg | GGGGACTAAAAC | | |
| | | | (SEQ ID. NO: 414) | (SEQ ID. | (SEQ ID. | | |
| | | | | NO: 415) | NO: 416) | | |
| 1b | Ebola_GP | LwaCas13a | GATTTAGACTACCCCAAAA | cacttgaacc | GATTTAGACTAC | Ebola | 1b |
| | _guide_90 | | ACGAAGGGGACTAAAACcac | attgcagag | CCCAAAAACGAA | ssRNA | |
| | | | ttgaaccattgcagaggaattttct | gaattttct | GGGGACTAAAAC | | |
| | | | (SEQ ID. NO: 417) | (SEQ ID. | (SEQ ID. | | |
| | | | | NO: 418) | NO: 419) | | |
| 7a | ssRNA1_ | LwaCas13a | GATTTAGACTACCCCAAAA | ccccgggta | GATTTAGACTAC | ssRNA1 | 7a |
| | guide_01 | | ACGAAGGGGACTAAAACccc | ccgagctcg | CCCAAAAACGAA | | |
| | | | cgggtaccgagctcgaattcactgg | aattcactgg | GGGGACTAAAAC | | |
| | | | (SEQ ID. NO: 420) | (SEQ ID. | (SEQ ID. | | |
| | | | | NO: 421) | NO: 422) | | |
| 7a | ssRNA1_ | LwaCas13a | GATTTAGACTACCCCAAAA | tccccgggt | GATTTAGACTAC | ssRNA1 | 7a |
| | guide_02 | | ACGAAGGGGACTAAAACtcc | accgagctc | CCCAAAAACGAA | | |
| | | | ccgggtaccgagctcgaattcactg | gaattcactg | GGGGACTAAAAC | | |
| | | | (SEQ ID. NO: 423) | (SEQ ID. | (SEQ ID. | | |
| | | | | NO: 424) | NO: 425) | | |
| 7a | ssRNA1_ | LwaCas13a | GATTTAGACTACCCCAAAA | atccccggg | GATTTAGACTAC | ssRNA1 | 7a |
| | guide_03 | | ACGAAGGGGACTAAAACatc | taccgagctc | CCCAAAAACGAA | | |
| | | | cccgggtaccgagctcgaattcact | gaattcact | GGGGACTAAAAC | | |
| | | | (SEQ ID. NO: 426) | (SEQ ID. | (SEQ ID. | | |
| | | | | NO: 427) | NO: 428) | | |
| 7a | ssRNA1_ | LwaCas13a | GATTTAGACTACCCCAAAA | aggatcccc | GATTTAGACTAC | ssRNA1 | 7a |
| | guide_04 | | ACGAAGGGGACTAAAACagg | gggtaccga | CCCAAAAACGAA | | |
| | | | atccccgggtaccgagctcgaattc | gctcgaattc | GGGGACTAAAAC | | |
| | | | (SEQ ID. NO: 429) | (SEQ ID. | (SEQ ID. | | |
| | | | | NO: 430) | NO: 431) | | |
| 7a | ssRNA1_ | LwaCas13a | GATTTAGACTACCCCAAAA | agaggatcc | GATTTAGACTAC | ssRNA1 | 7a |
| | guide_05 | | ACGAAGGGGACTAAAACaga | ccgggtacc | CCCAAAAACGAA | | |
| | | | ggatccccgggtaccgagctcgaat | gagctcgaa | GGGGACTAAAAC | | |
| | | | (SEQ ID. NO: 432) | t (SEQ | (SEQ ID. | | |
| | | | | ID. NO: | NO: 434) | | |
| | | | | 433) | | | |
| 7a | ssRNA1_ | LwaCas13a | GATTTAGACTACCCCAAAA | tctagaggat | GATTTAGACTAC | ssRNA1 | 7a |
| | guide_06 | | ACGAAGGGGACTAAAACtct | ccccgggta | CCCAAAAACGAA | | |
| | | | agaggatccccgggtaccgagctcg | ccgagctcg | GGGGACTAAAAC | | |
| | | | (SEQ ID. NO: 435) | (SEQ ID. | (SEQ ID. | | |
| | | | | NO: 436) | NO: 437) | | |
| 7a | ssRNA1_ | LwaCas13a | GATTTAGACTACCCCAAAA | ttctagagga | GATTTAGACTAC | ssRNA1 | 7a |
| | guide_07 | | ACGAAGGGGACTAAAACttc | tccccgggt | CCCAAAAACGAA | | |
| | | | tagaggatccccgggtaccgagctc | accgagctc | GGGGACTAAAAC | | |
| | | | (SEQ ID. NO: 438) | (SEQ ID. | (SEQ ID. | | |
| | | | | NO: 439) | NO: 440) | | |
| 7a | ssRNA1_ | LwaCas13a | GATTTAGACTACCCCAAAA | atttctagag | GATTTAGACTAC | ssRNA1 | 7a |
| | guide_08 | | ACGAAGGGGACTAAAACatt | gatccccgg | CCCAAAAACGAA | | |
| | | | tctagaggatccccgggtaccgagc | gtaccgagc | GGGGACTAAAAC | | |
| | | | (SEQ ID. NO: 441) | (SEQ ID. | (SEQ ID. | | |
| | | | | NO: 442) | NO: 443) | | |
| 7a | ssRNA1_ | LwaCas13a | GATTTAGACTACCCCAAAA | tatttctagag | GATTTAGACTAC | ssRNA1 | 7a |
| | guide_09 | | ACGAAGGGGACTAAAACtat | gatccccgg | CCCAAAAACGAA | | |
| | | | ttctagaggatccccgggtaccgag | gtaccgag | GGGGACTAAAAC | | |
| | | | (SEQ ID. NO: 444) | (SEQ ID. | (SEQ ID. | | |
| | | | | NO: 445) | NO: 446) | | |
| 7a | ssRNA1_ | LwaCas13a | GATTTAGACTACCCCAAAA | ccatatttcta | GATTTAGACTAC | ssRNA1 | 7a |
| | guide_10 | | ACGAAGGGGACTAAAACcca | gaggatccc | CCCAAAAACGAA | | |
| | | | tatttctagaggatccccgggtacc | cgggtacc | GGGGACTAAAAC | | |
| | | | (SEQ ID. NO: 447) | (SEQ ID. | (SEQ ID. | | |
| | | | | NO: 448) | NO: 449) | | |
| 7a | ssRNA1_ | LwaCas13a | GATTTAGACTACCCCAAAA | tccatatttct | GATTTAGACTAC | ssRNA1 | 7a |
| | guide_11 | | ACGAAGGGGACTAAAACtcc | agaggatcc | CCCAAAAACGAA | | |
| | | | atatttctagaggatccccgggtac | ccgggtac | GGGGACTAAAAC | | |
| | | | (SEQ ID. NO: 450) | (SEQ ID. | (SEQ ID. | | |
| | | | | NO: 451) | NO: 452) | | |
| 7a | ssRNA1_ | LwaCas13a | GATTTAGACTACCCCAAAA | atccatatttc | GATTTAGACTAC | ssRNA1 | 7a |
| | guide_12 | | ACGAAGGGGACTAAAACatc | tagaggatc | CCCAAAAACGAA | | |
| | | | catatttctagaggatccccgggta | cccgggta | GGGGACTAAAAC | | |
| | | | (SEQ ID. NO: 453) | (SEQ ID. | (SEQ ID. | | |
| | | | | NO: 454) | NO: 455) | | |
| 7a | ssRNA1_ | LwaCas13a | GATTTAGACTACCCCAAAA | taatccatatt | GATTTAGACTAC | ssRNA1 | 7a |
| | guide_13 | | ACGAAGGGGACTAAAACtaa | tctagaggat | CCCAAAAACGAA | | |
| | | | tccatatttctagaggatccccggg | ccccggg | GGGGACTAAAAC | | |
| | | | (SEQ ID. NO: 456) | (SEQ ID. | (SEQ ID. | | |
| | | | | NO: 457) | NO: 458) | | |
| 7a | ssRNA1_ | LwaCas13a | GATTTAGACTACCCCAAAA | gtaatccata | GATTTAGACTAC | ssRNA1 | 7a |
| | guide_14 | | ACGAAGGGGACTAAAACgta | tttctagagg | CCCAAAAACGAA | | |
| | | | atccatatttctagaggatccccgg | atccccgg | GGGGACTAAAAC | | |
| | | | (SEQ ID. NO: 459) | (SEQ ID. | (SEQ ID. | | |
| | | | | NO: 460) | NO: 461) | | |
| 7a | ssRNA1_ | LwaCas13a | GATTTAGACTACCCCAAAA | taccaagtaa | GATTTAGACTAC | ssRNA1 | 7a |
| | guide_15 | | ACGAAGGGGACTAAAACtac | tccatatttct | CCCAAAAACGAA | | |
| | | | caagtaatccatatttctagaggat | agaggat | GGGGACTAAAAC | | |
| | | | (SEQ ID. NO: 462) | (SEQ ID. | (SEQ ID. | | |
| | | | | NO: 463) | NO: 464) | | |
| 7a | ssRNA1_ | LwaCas13a | GATTTAGACTACCCCAAAA | tctaccaagt | GATTTAGACTAC | ssRNA1 | 7a |
| | guide_16 | | ACGAAGGGGACTAAAACtct | aatccatattt | CCCAAAAACGAA | | |
| | | | accaagtaatccatatttctagagg | ctagagg | GGGGACTAAAAC | | |
| | | | (SEQ ID. NO: 465) | (SEQ ID. | (SEQ ID. | | |
| | | | | NO: 466) | NO: 467) | | |
| 7a | ssRNA1_ | LwaCas13a | GATTTAGACTACCCCAAAA | gttctaccaa | GATTTAGACTAC | ssRNA1 | 7a |
| | guide_17 | | ACGAAGGGGACTAAAACgtt | gtaatccata | CCCAAAAACGAA | | |
| | | | ctaccaagtaatccatatttctaga | tttctaga | GGGGACTAAAAC | | |
| | | | (SEQ ID. NO: 468) | (SEQ ID. | (SEQ ID. | | |
| | | | | NO: 469) | NO: 470) | | |
| 7a | ssRNA1_ | LwaCas13a | GATTTAGACTACCCCAAAA | gctgttctac | GATTTAGACTAC | ssRNA1 | 7a |
| | guide_18 | | ACGAAGGGGACTAAAACgct | caagtaatcc | CCCAAAAACGAA | | |
| | | | gttctaccaagtaatccatatttct | atatttct | GGGGACTAAAAC | | |
| | | | (SEQ ID. NO: 471) | (SEQ ID. | (SEQ ID. | | |
| | | | | NO: 472) | NO: 473) | | |
| 7a | ssRNA1_ | LwaCas13a | GATTTAGACTACCCCAAAA | attgctgttct | GATTTAGACTAC | ssRNA1 | 7a |
| | guide_20 | | ACGAAGGGGACTAAAACatt | accaagtaat | CCCAAAAACGAA | | |
| | | | gctgttctaccaagtaatccatatt | ccatatt | GGGGACTAAAAC | | |
| | | | (SEQ ID. NO: 474) | (SEQ ID. | (SEQ ID. | | |
| | | | | NO: 475) | NO: 476) | | |
| 7a | ssRNA1_ | LwaCas13a | GATTTAGACTACCCCAAAA | tagattgctgt | GATTTAGACTAC | ssRNA1 | 7a |
| | guide_21 | | ACGAAGGGGACTAAAACtag | tctaccaagt | CCCAAAAACGAA | | |
| | | | attgctgttctaccaagtaatccat | aatccat | GGGGACTAAAAC | | |
| | | | (SEQ ID. NO: 477) | (SEQ ID. | (SEQ ID. | | |
| | | | | NO: 478) | NO: 479) | | |
| 7a | ssRNA1_ | LwaCas13a | GATTTAGACTACCCCAAAA | gtagattgct | GATTTAGACTAC | ssRNA1 | 7a |
| | guide_22 | | ACGAAGGGGACTAAAACgta | gttctaccaa | CCCAAAAACGAA | | |
| | | | gattgctgttctaccaagtaatcca | gtaatcca | GGGGACTAAAAC | | |
| | | | (SEQ ID. NO: 480) | (SEQ ID. | (SEQ ID. | | |
| | | | | NO: 481) | NO: 482) | | |
| 7a | ssRNA1_ | LwaCas13a | GATTTAGACTACCCCAAAA | agtagattgc | GATTTAGACTAC | ssRNA1 | 7a |
| | guide_23 | | ACGAAGGGGACTAAAACagt | tgttctacca | CCCAAAAACGAA | | |
| | | | agattgctgttctaccaagtaatcc | agtaatcc | GGGGACTAAAAC | | |
| | | | (SEQ ID. NO: 483) | (SEQ ID. | (SEQ ID. | | |
| | | | | NO: 484) | NO: 485) | | |
| 7a | ssRNA1_ | LwaCas13a | GATTTAGACTACCCCAAAA | gagtagattg | GATTTAGACTAC | ssRNA1 | 7a |
| | guide_24 | | ACGAAGGGGACTAAAACgag | ctgttctacc | CCCAAAAACGAA | | |
| | | | tagattgctgttctaccaagtaatc | aagtaatc | GGGGACTAAAAC | | |
| | | | (SEQ ID. NO: 486) | (SEQ ID. | (SEQ ID. | | |
| | | | | NO: 487) | NO: 488) | | |
| 7a | ssRNA1_ | LwaCas13a | GATTTAGACTACCCCAAAA | tcgagtagat | GATTTAGACTAC | ssRNA1 | 7a |
| | guide_25 | | ACGAAGGGGACTAAAACtcg | tgctgttctac | CCCAAAAACGAA | | |
| | | | agtagattgctgttctaccaagtaa | caagtaa | GGGGACTAAAAC | | |
| | | | (SEQ ID. NO: 489) | (SEQ ID. | (SEQ ID. | | |
| | | | | NO: 490) | NO: 491) | | |
| 7a | ssRNA1_ | LwaCas13a | GATTTAGACTACCCCAAAA | gtcgagtag | GATTTAGACTAC | ssRNA1 | 7a |
| | guide_26 | | ACGAAGGGGACTAAAACgtc | attgctgttct | CCCAAAAACGAA | | |
| | | | gagtagattgctgttctaccaagta | accaagta | GGGGACTAAAAC | | |
| | | | (SEQ ID. NO: 492) | (SEQ ID. | (SEQ ID. | | |
| | | | | NO: 493) | NO: 494) | | |
| 7a | ssRNA1_ | LwaCas13a | GATTTAGACTACCCCAAAA | caggtcgag | GATTTAGACTAC | ssRNA1 | 7a |
| | guide_28 | | ACGAAGGGGACTAAAACcag | tagattgctgt | CCCAAAAACGAA | | |
| | | | gtcgagtagattgctgttctaccaa | tctaccaa | GGGGACTAAAAC | | |
| | | | (SEQ ID. NO: 495) | (SEQ ID. | (SEQ ID. | | |
| | | | | NO: 496) | NO: 497) | | |
| 7a | ssRNA1_ | LwaCas13a | GATTTAGACTACCCCAAAA | gcaggtcga | GATTTAGACTAC | ssRNA1 | 7a |
| | guide_29 | | ACGAAGGGGACTAAAACgca | gtagattgct | CCCAAAAACGAA | | |
| | | | ggtcgagtagattgctgttctacca | gttctacca | GGGGACTAAAAC | | |
| | | | (SEQ ID. NO: 498) | (SEQ ID. | (SEQ ID. | | |
| | | | | NO: 499) | NO: 500) | | |
| 7a | ssRNA1_ | LwaCas13a | GATTTAGACTACCCCAAAA | tgcaggtcg | GATTTAGACTAC | ssRNA1 | 7a |
| | guide_30 | | ACGAAGGGGACTAAAACtgc | agtagattgc | CCCAAAAACGAA | | |
| | | | aggtcgagtagattgctgttctacc | tgttctacc | GGGGACTAAAAC | | |
| | | | (SEQ ID. NO: 501) | (SEQ ID. | (SEQ ID. | | |
| | | | | NO: 502) | NO: 503) | | |
| 7a | ssRNA1_ | LwaCas13a | GATTTAGACTACCCCAAAA | ctgcaggtc | GATTTAGACTAC | ssRNA1 | 7a |
| | guide_31 | | ACGAAGGGGACTAAAACctg | gagtagattg | CCCAAAAACGAA | | |
| | | | caggtcgagtagattgctgttctac | ctgttctac | GGGGACTAAAAC | | |
| | | | (SEQ ID. NO: 504) | (SEQ ID. | (SEQ ID. | | |
| | | | | NO: 505) | NO: 506) | | |
| 7a | ssRNA1_ | LwaCas13a | GATTTAGACTACCCCAAAA | cctgcaggt | GATTTAGACTAC | ssRNA1 | 7a |
| | guide_32 | | ACGAAGGGGACTAAAACcct | cgagtagatt | CCCAAAAACGAA | | |
| | | | gcaggtcgagtagattgctgttcta | gctgttcta | GGGGACTAAAAC | | |
| | | | (SEQ ID. NO: 507) | (SEQ ID. | (SEQ ID. | | |
| | | | | NO: 508) | NO: 509) | | |
| 7a | ssRNA1_ | LwaCas13a | GATTTAGACTACCCCAAAA | tgcctgcag | GATTTAGACTAC | ssRNA1 | 7a |
| | guide_33 | | ACGAAGGGGACTAAAACtgc | gtcgagtag | CCCAAAAACGAA | | |
| | | | ctgcaggtcgagtagattgctgttc | attgctgttc | GGGGACTAAAAC | | |
| | | | (SEQ ID. NO: 510) | (SEQ ID. | (SEQ ID. | | |
| | | | | NO: 511) | NO: 512) | | |
| 7a | ssRNA1_ | LwaCas13a | GATTTAGACTACCCCAAAA | atgcctgca | GATTTAGACTAC | ssRNA1 | 7a |
| | guide_34 | | ACGAAGGGGACTAAAACatg | ggtcgagta | CCCAAAAACGAA | | |
| | | | cctgcaggtcgagtagattgctgtt | gattgctgtt | GGGGACTAAAAC | | |
| | | | (SEQ ID. NO: 513) | (SEQ ID. | (SEQ ID. | | |
| | | | | NO: 514) | NO: 515) | | |
| 7a | ssRNA1_ | LwaCas13a | GATTTAGACTACCCCAAAA | catgcctgca | GATTTAGACTAC | ssRNA1 | 7a |
| | guide_35 | | ACGAAGGGGACTAAAACcat | ggtcgagta | CCCAAAAACGAA | | |
| | | | gcctgcaggtcgagtagattgctgt | gattgctgt | GGGGACTAAAAC | | |
| | | | (SEQ ID. NO: 516) | (SEQ ID. | (SEQ ID. | | |
| | | | | NO: 517) | NO: 518) | | |
| 7a | ssRNA1_ | LwaCas13a | GATTTAGACTACCCCAAAA | tgcatgcctg | GATTTAGACTAC | ssRNA1 | 7a |
| | guide_36 | | ACGAAGGGGACTAAAACtgc | caggtcgag | CCCAAAAACGAA | | |
| | | | atgcctgcaggtcgagtagattgct | tagattgct | GGGGACTAAAAC | | |
| | | | (SEQ ID. NO: 519) | (SEQ ID. | (SEQ ID. | | |
| | | | | NO: 520) | NO: 521) | | |
| 7a | ssRNA1_ | LwaCas13a | GATTTAGACTACCCCAAAA | cttgcatgcc | GATTTAGACTAC | ssRNA1 | 7a |
| | guide_38 | | ACGAAGGGGACTAAAACctt | tgcaggtcg | CCCAAAAACGAA | | |
| | | | gcatgcctgcaggtcgagtagattg | agtagattg | GGGGACTAAAAC | | |
| | | | (SEQ ID. NO: 522) | (SEQ ID. | (SEQ ID. | | |
| | | | | NO: 523) | NO: 524) | | |
| 7a | ssRNA1_ | LwaCas13a | GATTTAGACTACCCCAAAA | agcttgcatg | GATTTAGACTAC | ssRNA1 | 7a |
| | guide_40 | | ACGAAGGGGACTAAAACagc | cctgcaggt | CCCAAAAACGAA | | |
| | | | ttgcatgcctgcaggtcgagtagat | cgagtagat | GGGGACTAAAAC | | |
| | | | (SEQ ID. NO: 525) | (SEQ ID. | (SEQ ID. | | |
| | | | | NO: 526) | NO: 527) | | |
| 7a | ssRNA1_ | LwaCas13a | GATTTAGACTACCCCAAAA | caagcttgca | GATTTAGACTAC | ssRNA1 | 7a |
| | guide_42 | | ACGAAGGGGACTAAAACcaa | tgcctgcag | CCCAAAAACGAA | | |
| | | | gcttgcatgcctgcaggtcgagtag | gtcgagtag | GGGGACTAAAAC | | |
| | | | (SEQ ID. NO: 528) | (SEQ ID. | (SEQ ID. | | |
| | | | | NO: 529) | NO: 530) | | |
| 7a | ssRNA1_ | LwaCas13a | GATTTAGACTACCCCAAAA | ccaagcttgc | GATTTAGACTAC | ssRNA1 | 7a |
| | guide_43 | | ACGAAGGGGACTAAAACcca | atgcctgca | CCCAAAAACGAA | | |
| | | | agcttgcatgcctgcaggtcgagta | ggtcgagta | GGGGACTAAAAC | | |
| | | | (SEQ ID. NO: 531) | (SEQ ID. | (SEQ ID. | | |
| | | | | NO: 532) | NO: 533) | | |
| 7a | ssRNA1_ | LwaCas13a | GATTTAGACTACCCCAAAA | cgccaagctt | GATTTAGACTAC | ssRNA1 | 7a |
| | guide_44 | | ACGAAGGGGACTAAAACcgc | gcatgcctg | CCCAAAAACGAA | | |
| | | | caagcttgcatgcctgcaggtcgag | caggtcgag | GGGGACTAAAAC | | |
| | | | (SEQ ID. NO: 534) | (SEQ ID. | (SEQ ID. | | |
| | | | | NO: 535) | NO: 536) | | |
| 7a | ssRNA1_ | LwaCas13a | GATTTAGACTACCCCAAAA | acgccaagc | GATTTAGACTAC | ssRNA1 | 7a |
| | guide_45 | | ACGAAGGGGACTAAAACacg | ttgcatgcct | CCCAAAAACGAA | | |
| | | | ccaagcttgcatgcctgcaggtcga | gcaggtcga | GGGGACTAAAAC | | |
| | | | (SEQ ID. NO: 537) | (SEQ ID. | (SEQ ID. | | |
| | | | | NO: 538) | NO: 539) | | |
| 7a | ssRNA1_ | LwaCas13a | GATTTAGACTACCCCAAAA | tacgccaag | GATTTAGACTAC | ssRNA1 | 7a |
| | guide_46 | | ACGAAGGGGACTAAAACtac | cttgcatgcc | CCCAAAAACGAA | | |
| | | | gccaagcttgcatgcctgcaggtcg | tgcaggtcg | GGGGACTAAAAC | | |
| | | | (SEQ ID. NO: 540) | (SEQ ID. | (SEQ ID. | | |
| | | | | NO: 541) | NO: 542) | | |
| 7a | ssRNA1_ | LwaCas13a | GATTTAGACTACCCCAAAA | ttacgccaag | GATTTAGACTAC | ssRNA1 | 7a |
| | guide_47 | | ACGAAGGGGACTAAAACtta | cttgcatgcc | CCCAAAAACGAA | | |
| | | | cgccaagcttgcatgcctgcaggtc | tgcaggtc | GGGGACTAAAAC | | |
| | | | (SEQ ID. NO: 543) | (SEQ ID. | (SEQ ID. | | |
| | | | | NO: 544) | NO: 545) | | |
| 7a | ssRNA1_ | LwaCas13a | GATTTAGACTACCCCAAAA | attacgccaa | GATTTAGACTAC | ssRNA1 | 7a |
| | guide_48 | | ACGAAGGGGACTAAAACatt | gcttgcatgc | CCCAAAAACGAA | | |
| | | | acgccaagcttgcatgcctgcaggt | ctgcaggt | GGGGACTAAAAC | | |
| | | | (SEQ ID. NO: 546) | (SEQ ID. | (SEQ ID. | | |
| | | | | NO: 547) | NO: 548) | | |
| 7a | ssRNA1_ | LwaCas13a | GATTTAGACTACCCCAAAA | gattacgcca | GATTTAGACTAC | ssRNA1 | 7a |
| | guide_49 | | ACGAAGGGGACTAAAACgat | agcttgcatg | CCCAAAAACGAA | | |
| | | | tacgccaagcttgcatgcctgcagg | cctgcagg | GGGGACTAAAAC | | |
| | | | (SEQ ID. NO: 549) | (SEQ ID. | (SEQ ID. | | |
| | | | | NO: 550) | NO: 551) | | |
| 7a | ssRNA1_ | LwaCas13a | GATTTAGACTACCCCAAAA | ccatgattac | GATTTAGACTAC | ssRNA1 | 7a |
| | guide_52 | | ACGAAGGGGACTAAAACcca | gccaagctt | CCCAAAAACGAA | | |
| | | | tgattacgccaagcttgcatgcctg | gcatgcctg | GGGGACTAAAAC | | |
| | | | (SEQ ID. NO: 552) | (SEQ ID. | (SEQ ID. | | |
| | | | | NO: 553) | NO: 554) | | |
| 7a | ssRNA1_ | LwaCas13a | GATTTAGACTACCCCAAAA | accatgatta | GATTTAGACTAC | ssRNA1 | 7a |
| | guide_53 | | ACGAAGGGGACTAAAACacc | cgccaagctt | CCCAAAAACGAA | | |
| | | | atgattacgccaagcttgcatgcct | gcatgcct | GGGGACTAAAAC | | |
| | | | (SEQ ID. NO: 555) | (SEQ ID. | (SEQ ID. | | |
| | | | | NO: 556) | NO: 557) | | |
| 7a | ssRNA1_ | LwaCas13a | GATTTAGACTACCCCAAAA | gaccatgatt | GATTTAGACTAC | ssRNA1 | 7a |
| | guide_54 | | ACGAAGGGGACTAAAACgac | acgccaagc | CCCAAAAACGAA | | |
| | | | catgattacgccaagcttgcatgcc | ttgcatgcc | GGGGACTAAAAC | | |
| | | | (SEQ ID. NO: 558) | (SEQ ID. | (SEQ ID. | | |
| | | | | NO: 559) | NO: 560) | | |
| 7a | ssRNA1_ | LwaCas13a | GATTTAGACTACCCCAAAA | atgaccatga | GATTTAGACTAC | ssRNA1 | 7a |
| | guide_55 | | ACGAAGGGGACTAAAACatg | ttacgccaag | CCCAAAAACGAA | | |
| | | | accatgattacgccaagcttgcatg | cttgcatg | GGGGACTAAAAC | | |
| | | | (SEQ ID. NO: 561) | (SEQ ID. | (SEQ ID. | | |
| | | | | NO: 562) | NO: 563) | | |
| 7a | ssRNA1_ | LwaCas13a | GATTTAGACTACCCCAAAA | tatgaccatg | GATTTAGACTAC | ssRNA1 | 7a |
| | guide_56 | | ACGAAGGGGACTAAAACtat | attacgccaa | CCCAAAAACGAA | | |
| | | | gaccatgattacgccaagcttgcat | gcttgcat | GGGGACTAAAAC | | |
| | | | (SEQ ID. NO: 564) | (SEQ ID. | (SEQ ID. | | |
| | | | | NO: 565) | NO: 566) | | |
| 7a | ssRNA1_ | LwaCas13a | GATTTAGACTACCCCAAAA | agctatgacc | GATTTAGACTAC | ssRNA1 | 7a |
| | guide_57 | | ACGAAGGGGACTAAAACagc | atgattacgc | CCCAAAAACGAA | | |
| | | | tatgaccatgattacgccaagcttg | caagcttg | GGGGACTAAAAC | | |
| | | | (SEQ ID. NO: 567) | (SEQ ID. | (SEQ ID. | | |
| | | | | NO: 568) | NO: 569) | | |
| 7a | ssRNA1_ | LwaCas13a | GATTTAGACTACCCCAAAA | cagctatgac | GATTTAGACTAC | ssRNA1 | 7a |
| | guide_58 | | ACGAAGGGGACTAAAACcag | catgattacg | CCCAAAAACGAA | | |
| | | | ctatgaccatgattacgccaagctt | ccaagctt | GGGGACTAAAAC | | |
| | | | (SEQ ID. NO: 570) | (SEQ ID. | (SEQ ID. | | |
| | | | | NO: 571) | NO: 572) | | |
| 7a | ssRNA1_ | LwaCas13a | GATTTAGACTACCCCAAAA | acagctatga | GATTTAGACTAC | ssRNA1 | 7a |
| | guide_59 | | ACGAAGGGGACTAAAACaca | ccatgattac | CCCAAAAACGAA | | |
| | | | gctatgaccatgattacgccaagct | gccaagct | GGGGACTAAAAC | | |
| | | | (SEQ ID. NO: 573) | (SEQ ID. | (SEQ ID. | | |
| | | | | NO: 574) | NO: 575) | | |
| 7a | ssRNA1_ | LwaCas13a | GATTTAGACTACCCCAAAA | aacagctatg | GATTTAGACTAC | ssRNA1 | 7a |
| | guide_60 | | ACGAAGGGGACTAAAACaac | accatgatta | CCCAAAAACGAA | | |
| | | | agctatgaccatgattacgccaagc | cgccaagc | GGGGACTAAAAC | | |
| | | | (SEQ ID. NO: 576) | (SEQ ID. | (SEQ ID. | | |
| | | | | NO: 577) | NO: 578) | | |
| 7a | ssRNA1_ | LwaCas13a | GATTTAGACTACCCCAAAA | aacacagga | GATTTAGACTAC | ssRNA1 | 7a |
| | guide_64 | | ACGAAGGGGACTAAAACaac | aacagctatg | CCCAAAAACGAA | | |
| | | | acaggaaacagctatgaccatgatt | accatgatt | GGGGACTAAAAC | | |
| | | | (SEQ ID. NO: 579) | (SEQ ID. | (SEQ ID. | | |
| | | | | NO: 580) | NO: 581) | | |
| 7a | ssRNA1_ | LwaCas13a | GATTTAGACTACCCCAAAA | taaacacag | GATTTAGACTAC | ssRNA1 | 7a |
| | guide_65 | | ACGAAGGGGACTAAAACtaa | gaaacagct | CCCAAAAACGAA | | |
| | | | acacaggaaacagctatgaccatga | atgaccatga | GGGGACTAAAAC | | |
| | | | (SEQ ID. NO: 582) | (SEQ ID. | (SEQ ID. | | |
| | | | | NO: 583) | NO: 584) | | |
| 7a | ssRNA1_ | LwaCas13a | GATTTAGACTACCCCAAAA | ataaacaca | GATTTAGACTAC | ssRNA1 | 7a |
| | guide_66 | | ACGAAGGGGACTAAAACata | ggaaacagc | CCCAAAAACGAA | | |
| | | | aacacaggaaacagctatgaccatg | tatgaccatg | GGGGACTAAAAC | | |
| | | | (SEQ ID. NO: 585) | (SEQ ID. | (SEQ ID. | | |
| | | | | NO: 586) | NO: 587) | | |
| 7a | ssRNA1_ | LwaCas13a | GATTTAGACTACCCCAAAA | gataaacac | GATTTAGACTAC | ssRNA1 | 7a |
| | guide_67 | | ACGAAGGGGACTAAAACgat | aggaaacag | CCCAAAAACGAA | | |
| | | | aaacacaggaaacagctatgaccat | ctatgaccat | GGGGACTAAAAC | | |
| | | | (SEQ ID. NO: 588) | (SEQ ID. | (SEQ ID. | | |
| | | | | NO: 589) | NO: 590) | | |
| 7a | ssRNA1_ | LwaCas13a | GATTTAGACTACCCCAAAA | ggataaaca | GATTTAGACTAC | ssRNA1 | 7a |
| | guide_68 | | ACGAAGGGGACTAAAACgga | caggaaaca | CCCAAAAACGAA | | |
| | | | taaacacaggaaacagctatgacca | gctatgacca | GGGGACTAAAAC | | |
| | | | (SEQ ID. NO: 591) | (SEQ ID. | (SEQ ID. | | |
| | | | | NO: 592) | NO: 593) | | |
| 7a | ssRNA1_ | LwaCas13a | GATTTAGACTACCCCAAAA | cggataaac | GATTTAGACTAC | ssRNA1 | 7a |
| | guide_69 | | ACGAAGGGGACTAAAACcgg | acaggaaac | CCCAAAAACGAA | | |
| | | | ataaacacaggaaacagctatgacc | agctatgacc | GGGGACTAAAAC | | |
| | | | (SEQ ID. NO: 594) | (SEQ ID. | (SEQ ID. | | |
| | | | | NO: 595) | NO: 596) | | |
| 7a | ssRNA1_ | LwaCas13a | GATTTAGACTACCCCAAAA | gcggataaa | GATTTAGACTAC | ssRNA1 | 7a |
| | guide_70 | | ACGAAGGGGACTAAAACgcg | cacaggaaa | CCCAAAAACGAA | | |
| | | | gataaacacaggaaacagctatgac | cagctatgac | GGGGACTAAAAC | | |
| | | | (SEQ ID. NO: 597) | (SEQ ID. | (SEQ ID. | | |
| | | | | NO: 598) | NO: 599) | | |
| 7a | ssRNA1_ | LwaCas13a | GATTTAGACTACCCCAAAA | agcggataa | GATTTAGACTAC | ssRNA1 | 7a |
| | guide_71 | | ACGAAGGGGACTAAAACagc | acacaggaa | CCCAAAAACGAA | | |
| | | | ggataaacacaggaaacagctatga | acagctatga | GGGGACTAAAAC | | |
| | | | (SEQ ID. NO: 600) | (SEQ ID. | (SEQ ID. | | |
| | | | | NO: 601) | NO: 602) | | |
| 7a | ssRNA1_ | LwaCas13a | GATTTAGACTACCCCAAAA | tgagcggat | GATTTAGACTAC | ssRNA1 | 7a |
| | guide_72 | | ACGAAGGGGACTAAAACtga | aaacacagg | CCCAAAAACGAA | | |
| | | | gcggataaacacaggaaacagctat | aaacagctat | GGGGACTAAAAC | | |
| | | | (SEQ ID. NO: 603) | (SEQ ID. | (SEQ ID. | | |
| | | | | NO: 604) | NO: 605) | | |
| 7a | ssRNA1_ | LwaCas13a | GATTTAGACTACCCCAAAA | tgtgagcgg | GATTTAGACTAC | ssRNA1 | 7a |
| | guide_73 | | ACGAAGGGGACTAAAACtgt | ataaacaca | CCCAAAAACGAA | | |
| | | | gagcggataaacacaggaaacagct | ggaaacagc | GGGGACTAAAAC | | |
| | | | (SEQ ID. NO: 606) | t (SEQ | (SEQ ID. | | |
| | | | | ID. NO: | NO: 608) | | |
| | | | | 607) | | | |
| 7a | ssRNA1_ | LwaCas13a | GATTTAGACTACCCCAAAA | ttgtgagcgg | GATTTAGACTAC | ssRNA1 | 7a |
| | guide_74 | | ACGAAGGGGACTAAAACttg | ataaacaca | CCCAAAAACGAA | | |
| | | | tgagcggataaacacaggaaacagc | ggaaacagc | GGGGACTAAAAC | | |
| | | | (SEQ ID. NO: 609) | (SEQ ID. | (SEQ ID. | | |
| | | | | NO: 610) | NO: 611) | | |
| 7a | ssRNA1_ | LwaCas13a | GATTTAGACTACCCCAAAA | ggaattgtga | GATTTAGACTAC | ssRNA1 | 7a |
| | guide_76 | | ACGAAGGGGACTAAAACgga | gcggataaa | CCCAAAAACGAA | | |
| | | | attgtgagcggataaacacaggaaa | cacaggaaa | GGGGACTAAAAC | | |
| | | | (SEQ ID. NO: 612) | (SEQ ID. | (SEQ ID. | | |
| | | | | NO: 613) | NO: 614) | | |
| 7a | ssRNA1_ | LwaCas13a | GATTTAGACTACCCCAAAA | tggaattgtg | GATTTAGACTAC | ssRNA1 | 7a |
| | guide_77 | | ACGAAGGGGACTAAAACtgg | agcggataa | CCCAAAAACGAA | | |
| | | | aattgtgagcggataaacacaggaa | acacaggaa | GGGGACTAAAAC | | |
| | | | (SEQ ID. NO: 615) | (SEQ ID. | (SEQ ID. | | |
| | | | | NO: 616) | NO: 617) | | |
| 7a | ssRNA1_ | LwaCas13a | GATTTAGACTACCCCAAAA | gtggaattgt | GATTTAGACTAC | ssRNA1 | 7a |
| | guide_78 | | ACGAAGGGGACTAAAACgtg | gagcggata | CCCAAAAACGAA | | |
| | | | gaattgtgagcggataaacacagga | aacacagga | GGGGACTAAAAC | | |
| | | | (SEQ ID. NO: 618) | (SEQ ID. | (SEQ ID. | | |
| | | | | NO: 619) | NO: 620) | | |
| 7a | ssRNA1_ | LwaCas13a | GATTTAGACTACCCCAAAA | tgtggaattg | GATTTAGACTAC | ssRNA1 | 7a |
| | guide_79 | | ACGAAGGGGACTAAAACtgt | tgagcggat | CCCAAAAACGAA | | |
| | | | ggaattgtgagcggataaacacagg | aaacacagg | GGGGACTAAAAC | | |
| | | | (SEQ ID. NO: 621) | (SEQ ID. | (SEQ ID. | | |
| | | | | NO: 622) | NO: 623) | | |
| 7a | ssRNA1_ | LwaCas13a | GATTTAGACTACCCCAAAA | tgtgtggaat | GATTTAGACTAC | ssRNA1 | 7a |
| | guide_80 | | ACGAAGGGGACTAAAACtgt | tgtgagcgg | CCCAAAAACGAA | | |
| | | | gtggaattgtgagcggataaacaca | ataaacaca | GGGGACTAAAAC | | |
| | | | (SEQ ID. NO: 624) | (SEQ ID. | (SEQ ID. | | |
| | | | | NO: 625) | NO: 626) | | |
| 7a | ssRNA1_ | LwaCas13a | GATTTAGACTACCCCAAAA | ttgtgtggaa | GATTTAGACTAC | ssRNA1 | 7a |
| | guide_81 | | ACGAAGGGGACTAAAACttg | ttgtgagcgg | CCCAAAAACGAA | | |
| | | | tgtggaattgtgagcggataaacac | ataaacac | GGGGACTAAAAC | | |
| | | | (SEQ ID. NO: 627) | (SEQ ID. | (SEQ ID. | | |
| | | | | NO: 628) | NO: 629) | | |
| 7a | ssRNA1_ | LwaCas13a | GATTTAGACTACCCCAAAA | gttgtgtgga | GATTTAGACTAC | ssRNA1 | 7a |
| | guide_82 | | ACGAAGGGGACTAAAACgtt | attgtgagcg | CCCAAAAACGAA | | |
| | | | gtgtggaattgtgagcggataaaca | gataaaca | GGGGACTAAAAC | | |
| | | | (SEQ ID. NO: 630) | (SEQ ID. | (SEQ ID. | | |
| | | | | NO: 631) | NO: 632) | | |
| 7a | ssRNA1_ | LwaCas13a | GATTTAGACTACCCCAAAA | atgttgtgtg | GATTTAGACTAC | ssRNA1 | 7a |
| | guide_83 | | ACGAAGGGGACTAAAACatg | gaattgtgag | CCCAAAAACGAA | | |
| | | | ttgtgtggaattgtgagcggataaa | cggataaa | GGGGACTAAAAC | | |
| | | | (SEQ ID. NO: 633) | (SEQ ID. | (SEQ ID. | | |
| | | | | NO: 634) | NO: 635) | | |
| 7a | ssRNA1_ | LwaCas13a | GATTTAGACTACCCCAAAA | tatgttgtgtg | GATTTAGACTAC | ssRNA1 | 7a |
| | guide_84 | | ACGAAGGGGACTAAAACtat | gaattgtgag | CCCAAAAACGAA | | |
| | | | gttgtgtggaattgtgagcggataa | cggataa | GGGGACTAAAAC | | |
| | | | (SEQ ID. NO: 636) | (SEQ ID. | (SEQ ID. | | |
| | | | | NO: 637) | NO: 638) | | |
| 7a | ssRNA1_ | LwaCas13a | GATTTAGACTACCCCAAAA | tegtatgttgt | GATTTAGACTAC | ssRNA1 | 7a |
| | guide_86 | | ACGAAGGGGACTAAAACtcg | gtggaattgt | CCCAAAAACGAA | | |
| | | | tatgttgtgtggaattgtgagcgga | gagcgga | GGGGACTAAAAC | | |
| | | | (SEQ ID. NO: 639) | (SEQ ID. | (SEQ ID. | | |
| | | | | NO: 640) | NO: 641) | | |
| 7a | ssRNA1_ | LwaCas13a | GATTTAGACTACCCCAAAA | ggctcgtatg | GATTTAGACTAC | ssRNA1 | 7a |
| | guide_88 | | ACGAAGGGGACTAAAACggc | ttgtgtggaa | CCCAAAAACGAA | | |
| | | | tcgtatgttgtgtggaattgtgagc | ttgtgagc | GGGGACTAAAAC | | |
| | | | (SEQ ID. NO: 642) | (SEQ ID. | (SEQ ID. | | |
| | | | | NO: 643) | NO: 644) | | |
| 7a | ssRNA1_ | LwaCas13a | GATTTAGACTACCCCAAAA | cggctcgtat | GATTTAGACTAC | ssRNA1 | 7a |
| | guide_89 | | ACGAAGGGGACTAAAACcgg | gttgtgtgga | CCCAAAAACGAA | | |
| | | | ctcgtatgttgtgtggaattgtgag | attgtgag | GGGGACTAAAAC | | |
| | | | (SEQ ID. NO: 645) | (SEQ ID. | (SEQ ID. | | |
| | | | | NO: 646) | NO: 647) | | |
| 7a | ssRNA1_ | LwaCas13a | GATTTAGACTACCCCAAAA | ccggctcgt | GATTTAGACTAC | ssRNA1 | 7a |
| | guide_90 | | ACGAAGGGGACTAAAACccg | atgttgtgtg | CCCAAAAACGAA | | |
| | | | gctcgtatgttgtgtggaattgtga | gaattgtga | GGGGACTAAAAC | | |
| | | | (SEQ ID. NO: 648) | (SEQ ID. | (SEQ ID. | | |
| | | | | NO: 649) | NO: 650) | | |
| 7a | ssRNA1_ | LwaCas13a | GATTTAGACTACCCCAAAA | ttccggctcg | GATTTAGACTAC | ssRNA1 | 7a |
| | guide_91 | | ACGAAGGGGACTAAAACttc | tatgttgtgtg | CCCAAAAACGAA | | |
| | | | cggctcgtatgttgtgtggaattgt | gaattgt | GGGGACTAAAAC | | |
| | | | (SEQ ID. NO: 651) | (SEQ ID. | (SEQ ID. | | |
| | | | | NO: 652) | NO: 653) | | |
| 7a | ssRNA1_ | LwaCas13a | GATTTAGACTACCCCAAAA | cttccggctc | GATTTAGACTAC | ssRNA1 | 7a |
| | guide_92 | | ACGAAGGGGACTAAAACctt | gtatgttgtgt | CCCAAAAACGAA | | |
| | | | ccggctcgtatgttgtgtggaattg | ggaattg | GGGGACTAAAAC | | |
| | | | (SEQ ID. NO: 654) | (SEQ ID. | (SEQ ID. | | |
| | | | | NO: 655) | NO: 656) | | |
| 7a | ssRNA1_ | LwaCas13a | GATTTAGACTACCCCAAAA | gcttccggct | GATTTAGACTAC | ssRNA1 | 7a |
| | guide_93 | | ACGAAGGGGACTAAAACgct | cgtatgttgt | CCCAAAAACGAA | | |
| | | | tccggctcgtatgttgtgtggaatt | gtggaatt | GGGGACTAAAAC | | |
| | | | (SEQ ID. NO: 657) | (SEQ ID. | (SEQ ID. | | |
| | | | | NO: 658) | NO: 659) | | |
| 7a | ssRNA1_ | LwaCas13a | GATTTAGACTACCCCAAAA | atgcttccgg | GATTTAGACTAC | ssRNA1 | 7a |
| | guide_94 | | ACGAAGGGGACTAAAACatg | ctcgtatgttg | CCCAAAAACGAA | | |
| | | | cttceggctcgtatgttgtgtggaa | tgtggaa | GGGGACTAAAAC | | |
| | | | (SEQ ID. NO: 660) | (SEQ ID. | (SEQ ID. | | |
| | | | | NO: 661) | NO: 662) | | |
| 7a | ssRNA1_ | LwaCas13a | GATTTAGACTACCCCAAAA | tatgcttccg | GATTTAGACTAC | ssRNA1 | 7a |
| | guide_95 | | ACGAAGGGGACTAAAACtat | gctcgtatgtt | CCCAAAAACGAA | | |
| | | | gcttccggctcgtatgttgtgtgga | gtgtgga | GGGGACTAAAAC | | |
| | | | (SEQ ID. NO: 663) | (SEQ ID. | (SEQ ID. | | |
| | | | | NO: 664) | NO: 665) | | |
| 7a | ssRNA1_ | LwaCas13a | GATTTAGACTACCCCAAAA | ttatgcttccg | GATTTAGACTAC | ssRNA1 | 7a |
| | guide_96 | | ACGAAGGGGACTAAAACtta | gctcgtatgtt | CCCAAAAACGAA | | |
| | | | tgcttccggctcgtatgttgtgtgg | gtgtgg | GGGGACTAAAAC | | |
| | | | (SEQ ID. NO: 666) | (SEQ ID. | (SEQ ID. | | |
| | | | | NO: 667) | NO: 668) | | |
| 7a | therm_00 | LwaCas13a | GATTTAGACTACCCCAAAA | taatttaaca | GATTTAGACTAC | ther- | 7a |
| | | | ACGAAGGGGACTAAAACtaa | gtatcaccat | CCCAAAAACGAA | mo- | |
| | | | tttaacagtatcaccatcaatcgct | caatcgct | GGGGACTAAAAC | nu- | |
| | | | (SEQ ID. NO: 669) | (SEQ ID. | (SEQ ID. | clease | |
| | | | | NO: 670) | NO: 671) | | |
| 7a | therm_01 | LwaCas13a | GATTTAGACTACCCCAAAA | ttaatttaaca | GATTTAGACTAC | ther- | 7a |
| | | | ACGAAGGGGACTAAAACtta | gtatcaccat | CCCAAAAACGAA | mo- | |
| | | | atttaacagtatcaccatcaatcgc | caatcgc | GGGGACTAAAAC | nu- | |
| | | | (SEQ ID. NO: 672) | (SEQ ID. | (SEQ ID. | clease | |
| | | | | NO: 673) | NO: 674) | | |
| 7a | therm_02 | LwaCas13a | GATTTAGACTACCCCAAAA | attaatttaac | GATTTAGACTAC | ther- | 7a |
| | | | ACGAAGGGGACTAAAACatt | agtatcacca | CCCAAAAACGAA | mo- | |
| | | | aatttaacagtatcaccatcaatcg | tcaatcg | GGGGACTAAAAC | nu- | |
| | | | (SEQ ID. NO: 675) | (SEQ ID. | (SEQ ID. | clease | |
| | | | | NO: 676) | NO: 677) | | |
| 7a | therm_03 | LwaCas13a | GATTTAGACTACCCCAAAA | cattaatttaa | GATTTAGACTAC | ther- | 7a |
| | | | ACGAAGGGGACTAAAACcat | cagtatcacc | CCCAAAAACGAA | mo- | |
| | | | taatttaacagtatcaccatcaatc | atcaatc | GGGGACTAAAAC | nu- | |
| | | | (SEQ ID. NO: 678) | (SEQ ID. | (SEQ ID. | clease | |
| | | | | NO: 679) | NO: 680) | | |
| 7a | therm_04 | LwaCas13a | GATTTAGACTACCCCAAAA | acattaattta | GATTTAGACTAC | ther- | 7a |
| | | | ACGAAGGGGACTAAAACaca | acagtatcac | CCCAAAAACGAA | mo- | |
| | | | ttaatttaacagtatcaccatcaat | catcaat | GGGGACTAAAAC | nu- | |
| | | | (SEQ ID. NO: 681) | (SEQ ID. | (SEQ ID. | clease | |
| | | | | NO: 682) | NO: 683) | | |
| 7a | therm_05 | LwaCas13a | GATTTAGACTACCCCAAAA | tacattaattt | GATTTAGACTAC | ther- | 7a |
| | | | ACGAAGGGGACTAAAACtac | aacagtatca | CCCAAAAACGAA | mo- | |
| | | | attaatttaacagtatcaccatcaa | ccatcaa | GGGGACTAAAAC | nu- | |
| | | | (SEQ ID. NO: 684) | (SEQ ID. | (SEQ ID. | clease | |
| | | | | NO: 685) | NO: 686) | | |
| 7a | therm_06 | LwaCas13a | GATTTAGACTACCCCAAAA | gtacattaatt | GATTTAGACTAC | ther- | 7a |
| | | | ACGAAGGGGACTAAAACgta | taacagtatc | CCCAAAAACGAA | mo- | |
| | | | cattaatttaacagtatcaccatca | accatca | GGGGACTAAAAC | nu- | |
| | | | (SEQ ID. NO: 687) | (SEQ ID. | (SEQ ID. | clease | |
| | | | | NO: 688) | NO: 689) | | |
| 7a | therm_07 | LwaCas13a | GATTTAGACTACCCCAAAA | tgtacattaat | GATTTAGACTAC | ther- | 7a |
| | | | ACGAAGGGGACTAAAACtgt | ttaacagtat | CCCAAAAACGAA | mo- | |
| | | | acattaatttaacagtatcaccatc | caccatc | GGGGACTAAAAC | nu- | |
| | | | (SEQ ID. NO: 690) | (SEQ ID. | (SEQ ID. | clease | |
| | | | | NO: 691) | NO: 692) | | |
| 7a | therm_08 | LwaCas13a | GATTTAGACTACCCCAAAA | ttgtacattaa | GATTTAGACTAC | ther- | 7a |
| | | | ACGAAGGGGACTAAAACttg | tttaacagtat | CCCAAAAACGAA | mo- | |
| | | | tacattaatttaacagtatcaccat | caccat | GGGGACTAAAAC | nu- | |
| | | | (SEQ ID. NO: 693) | (SEQ ID. | (SEQ ID. | clease | |
| | | | | NO: 694) | NO: 695) | | |
| 7a | therm_09 | LwaCas13a | GATTTAGACTACCCCAAAA | tttgtacatta | GATTTAGACTAC | ther- | 7a |
| | | | ACGAAGGGGACTAAAACttt | atttaacagt | CCCAAAAACGAA | mo- | |
| | | | gtacattaatttaacagtatcacca | atcacca | GGGGACTAAAAC | nu- | |
| | | | (SEQ ID. NO: 696) | (SEQ ID. | (SEQ ID. | clease | |
| | | | | NO: 697) | NO: 698) | | |
| 7a | therm_10 | LwaCas13a | GATTTAGACTACCCCAAAA | ctttgtacatt | GATTTAGACTAC | ther- | 7a |
| | | | ACGAAGGGGACTAAAACctt | aatttaacag | CCCAAAAACGAA | mo- | |
| | | | tgtacattaatttaacagtatcacc | tatcacc | GGGGACTAAAAC | nu- | |
| | | | (SEQ ID. NO: 699) | (SEQ ID. | (SEQ ID. | clease | |
| | | | | NO: 700) | NO: 701) | | |
| 7a | therm_11 | LwaCas13a | GATTTAGACTACCCCAAAA | cctttgtacat | GATTTAGACTAC | ther- | 7a |
| | | | ACGAAGGGGACTAAAACcct | taatttaaca | CCCAAAAACGAA | mo- | |
| | | | ttgtacattaatttaacagtatcac | gtatcac | GGGGACTAAAAC | nu- | |
| | | | (SEQ ID. NO: 702) | (SEQ ID. | (SEQ ID. | clease | |
| | | | | NO: 703) | NO: 704) | | |
| 7a | therm_12 | LwaCas13a | GATTTAGACTACCCCAAAA | acctttgtac | GATTTAGACTAC | ther- | 7a |
| | | | ACGAAGGGGACTAAAACacc | attaatttaac | CCCAAAAACGAA | mo- | |
| | | | tttgtacattaatttaacagtatca | agtatca | GGGGACTAAAAC | nu- | |
| | | | (SEQ ID. NO: 705) | (SEQ ID. | (SEQ ID. | clease | |
| | | | | NO: 706) | NO: 707) | | |
| 7a | therm_13 | LwaCas13a | GATTTAGACTACCCCAAAA | gacctttgta | GATTTAGACTAC | ther- | 7a |
| | | | ACGAAGGGGACTAAAACgac | cattaatttaa | CCCAAAAACGAA | mo- | |
| | | | ctttgtacattaatttaacagtatc | cagtatc | GGGGACTAAAAC | nu- | |
| | | | (SEQ ID. NO: 708) | (SEQ ID. | (SEQ ID. | clease | |
| | | | | NO: 709) | NO: 710) | | |
| 7a | therm_14 | LwaCas13a | GATTTAGACTACCCCAAAA | tgacctttgta | GATTTAGACTAC | ther- | 7a |
| | | | ACGAAGGGGACTAAAACtga | cattaatttaa | CCCAAAAACGAA | mo- | |
| | | | cctttgtacattaatttaacagtat | cagtat | GGGGACTAAAAC | nu- | |
| | | | (SEQ ID. NO: 711) | (SEQ ID. | (SEQ ID. | clease | |
| | | | | NO: 712) | NO: 713) | | |
| 7a | therm_15 | LwaCas13a | GATTTAGACTACCCCAAAA | ttgacctttgt | GATTTAGACTAC | ther- | 7a |
| | | | ACGAAGGGGACTAAAACttg | acattaattta | CCCAAAAACGAA | mo- | |
| | | | acctttgtacattaatttaacagta | acagta | GGGGACTAAAAC | nu- | |
| | | | (SEQ ID. NO: 714) | (SEQ ID. | (SEQ ID. | clease | |
| | | | | NO: 715) | NO: 716) | | |
| 7a | therm_16 | LwaCas13a | GATTTAGACTACCCCAAAA | gttgacctttg | GATTTAGACTAC | ther- | 7a |
| | | | ACGAAGGGGACTAAAACgtt | tacattaattt | CCCAAAAACGAA | mo- | |
| | | | gacctttgtacattaatttaacagt | aacagt | GGGGACTAAAAC | nu- | |
| | | | (SEQ ID. NO: 717) | (SEQ ID. | (SEQ ID. | clease | |
| | | | | NO: 718) | NO: 719) | | |
| 7a | therm_17 | LwaCas13a | GATTTAGACTACCCCAAAA | ggttgaccttt | GATTTAGACTAC | ther- | 7a |
| | | | ACGAAGGGGACTAAAACggt | gtacattaatt | CCCAAAAACGAA | mo- | |
| | | | tgacctttgtacattaatttaacag | taacag | GGGGACTAAAAC | nu- | |
| | | | (SEQ ID. NO: 720) | (SEQ ID. | (SEQ ID. | clease | |
| | | | | NO: 721) | NO: 722) | | |
| 7a | therm_18 | LwaCas13a | GATTTAGACTACCCCAAAA | tggttgacctt | GATTTAGACTAC | ther- | 7a |
| | | | ACGAAGGGGACTAAAACtgg | tgtacattaat | CCCAAAAACGAA | mo- | |
| | | | ttgacctttgtacattaatttaaca | ttaaca | GGGGACTAAAAC | nu- | |
| | | | (SEQ ID. NO: 723) | (SEQ ID. | (SEQ ID. | clease | |
| | | | | NO: 724) | NO: 725) | | |
| 7a | therm_19 | LwaCas13a | GATTTAGACTACCCCAAAA | ttggttgacct | GATTTAGACTAC | ther- | 7a |
| | | | ACGAAGGGGACTAAAACttg | ttgtacattaa | CCCAAAAACGAA | mo- | |
| | | | gttgacctttgtacattaatttaac | tttaac | GGGGACTAAAAC | nu- | |
| | | | (SEQ ID. NO: 726) | (SEQ ID. | (SEQ ID. | clease | |
| | | | | NO: 727) | NO: 728) | | |
| 7a | therm_20 | LwaCas13a | GATTTAGACTACCCCAAAA | cattggttga | GATTTAGACTAC | ther- | 7a |
| | | | ACGAAGGGGACTAAAACcat | cctttgtacat | CCCAAAAACGAA | mo- | |
| | | | tggttgacctttgtacattaattta | taattta | GGGGACTAAAAC | nu- | |
| | | | (SEQ ID. NO: 729) | (SEQ ID. | (SEQ ID. | clease | |
| | | | | NO: 730) | NO: 731) | | |
| 7a | therm_21 | LwaCas13a | GATTTAGACTACCCCAAAA | gtcattggtt | GATTTAGACTAC | ther- | 7a |
| | | | ACGAAGGGGACTAAAACgtc | gacctttgta | CCCAAAAACGAA | mo- | |
| | | | attggttgacctttgtacattaatt | cattaatt | GGGGACTAAAAC | nu- | |
| | | | (SEQ ID. NO: 732) | (SEQ ID. | (SEQ ID. | clease | |
| | | | | NO: 733) | NO: 734) | | |
| 7a | therm_22 | LwaCas13a | GATTTAGACTACCCCAAAA | atgtcattggt | GATTTAGACTAC | ther- | 7a |
| | | | ACGAAGGGGACTAAAACatg | tgacctttgta | CCCAAAAACGAA | mo- | |
| | | | tcattggttgacctttgtacattaa | cattaa | GGGGACTAAAAC | nu- | |
| | | | (SEQ ID. NO: 735) | (SEQ ID. | (SEQ ID. | clease | |
| | | | | NO: 736) | NO: 737) | | |
| 7a | therm_23 | LwaCas13a | GATTTAGACTACCCCAAAA | gaatgtcatt | GATTTAGACTAC | ther- | 7a |
| | | | ACGAAGGGGACTAAAACgaa | ggttgaccttt | CCCAAAAACGAA | mo- | |
| | | | tgtcattggttgacctttgtacatt | gtacatt | GGGGACTAAAAC | nu- | |
| | | | (SEQ ID. NO: 738) | (SEQ ID. | (SEQ ID. | clease | |
| | | | | NO: 739) | NO: 740) | | |
| 7a | therm_24 | LwaCas13a | GATTTAGACTACCCCAAAA | ctgaatgtca | GATTTAGACTAC | ther- | 7a |
| | | | ACGAAGGGGACTAAAACctg | ttggttgacct | CCCAAAAACGAA | mo- | |
| | | | aatgtcattggttgacctttgtaca | ttgtaca | GGGGACTAAAAC | nu- | |
| | | | (SEQ ID. NO: 741) | (SEQ ID. | (SEQ ID. | clease | |
| | | | | NO: 742) | NO: 743) | | |
| 7a | therm_25 | LwaCas13a | GATTTAGACTACCCCAAAA | gtctgaatgt | GATTTAGACTAC | ther- | 7a |
| | | | ACGAAGGGGACTAAAACgtc | cattggttga | CCCAAAAACGAA | mo- | |
| | | | tgaatgtcattggttgacctttgta | cctttgta | GGGGACTAAAAC | nu- | |
| | | | (SEQ ID. NO: 744) | (SEQ ID. | (SEQ ID. | clease | |
| | | | | NO: 745) | NO: 746) | | |
| 7a | therm_26 | LwaCas13a | GATTTAGACTACCCCAAAA | tagtctgaat | GATTTAGACTAC | ther- | 7a |
| | | | ACGAAGGGGACTAAAACtag | gtcattggtt | CCCAAAAACGAA | mo- | |
| | | | tctgaatgtcattggttgacctttg | gacctttg | GGGGACTAAAAC | nu- | |
| | | | (SEQ ID. NO: 747) | (SEQ ID. | (SEQ ID. | clease | |
| | | | | NO: 748) | NO: 749) | | |
| 7a | therm_27 | LwaCas13a | GATTTAGACTACCCCAAAA | aatagtctga | GATTTAGACTAC | ther- | 7a |
| | | | ACGAAGGGGACTAAAACaat | atgtcattggt | CCCAAAAACGAA | mo- | |
| | | | agtctgaatgtcattggttgacctt | tgacctt | GGGGACTAAAAC | nu- | |
| | | | (SEQ ID. NO: 750) | (SEQ ID. | (SEQ ID. | clease | |
| | | | | NO: 751) | NO: 752) | | |
| 7a | therm_28 | LwaCas13a | GATTTAGACTACCCCAAAA | ataatagtct | GATTTAGACTAC | ther- | 7a |
| | | | ACGAAGGGGACTAAAACata | gaatgtcatt | CCCAAAAACGAA | mo- | |
| | | | atagtctgaatgtcattggttgacc | ggttgacc | GGGGACTAAAAC | nu- | |
| | | | (SEQ ID. NO: 753) | (SEQ ID. | (SEQ ID. | clease | |
| | | | | NO: 754) | NO: 755) | | |
| 7a | therm_29 | LwaCas13a | GATTTAGACTACCCCAAAA | caataatagt | GATTTAGACTAC | ther- | 7a |
| | | | ACGAAGGGGACTAAAACcaa | ctgaatgtca | CCCAAAAACGAA | mo- | |
| | | | taatagtctgaatgtcattggttga | ttggttga | GGGGACTAAAAC | nu- | |
| | | | (SEQ ID. NO: 756) | (SEQ ID. | (SEQ ID. | clease | |
| | | | | NO: 757) | NO: 758) | | |
| 7a | therm_30 | LwaCas13a | GATTTAGACTACCCCAAAA | accaataata | GATTTAGACTAC | ther- | 7a |
| | | | ACGAAGGGGACTAAAACacc | gtctgaatgt | CCCAAAAACGAA | mo- | |
| | | | aataatagtctgaatgtcattggtt | cattggtt | GGGGACTAAAAC | nu- | |
| | | | (SEQ ID. NO: 759) | (SEQ ID. | (SEQ ID. | clease | |
| | | | | NO: 760) | NO: 761) | | |
| 7a | therm_31 | LwaCas13a | GATTTAGACTACCCCAAAA | caaccaata | GATTTAGACTAC | ther- | 7a |
| | | | ACGAAGGGGACTAAAACcaa | atagtctgaa | CCCAAAAACGAA | mo- | |
| | | | ccaataatagtctgaatgtcattgg | tgtcattgg | GGGGACTAAAAC | nu- | |
| | | | (SEQ ID. NO: 762) | (SEQ ID. | (SEQ ID. | clease | |
| | | | | NO: 763) | NO: 764) | | |
| 7a | therm_32 | LwaCas13a | GATTTAGACTACCCCAAAA | atcaaccaat | GATTTAGACTAC | ther- | 7a |
| | | | ACGAAGGGGACTAAAACatc | aatagtctga | CCCAAAAACGAA | mo- | |
| | | | aaccaataatagtctgaatgtcatt | atgtcatt | GGGGACTAAAAC | nu- | |
| | | | (SEQ ID. NO: 765) | (SEQ ID. | (SEQ ID. | clease | |
| | | | | NO: 766) | NO: 767) | | |
| 7a | therm_33 | LwaCas13a | GATTTAGACTACCCCAAAA | gtatcaacca | GATTTAGACTAC | ther- | 7a |
| | | | ACGAAGGGGACTAAAACgta | ataatagtct | CCCAAAAACGAA | mo- | |
| | | | tcaaccaataatagtctgaatgtca | gaatgtca | GGGGACTAAAAC | nu- | |
| | | | (SEQ ID. NO: 768) | (SEQ ID. | (SEQ ID. | clease | |
| | | | | NO: 769) | NO: 770) | | |
| 7a | therm_34 | LwaCas13a | GATTTAGACTACCCCAAAA | gtgtatcaac | GATTTAGACTAC | ther- | 7a |
| | | | ACGAAGGGGACTAAAACgtg | caataatagt | CCCAAAAACGAA | mo- | |
| | | | tatcaaccaataatagtctgaatgt | ctgaatgt | GGGGACTAAAAC | nu- | |
| | | | (SEQ ID. NO: 771) | (SEQ ID. | (SEQ ID. | clease | |
| | | | | NO: 772) | NO: 773) | | |
| 7a | therm_35 | LwaCas13a | GATTTAGACTACCCCAAAA | aggtgtatca | GATTTAGACTAC | ther- | 7a |
| | | | ACGAAGGGGACTAAAACagg | accaataata | CCCAAAAACGAA | mo- | |
| | | | tgtatcaaccaataatagtctgaat | gtctgaat | GGGGACTAAAAC | nu- | |
| | | | (SEQ ID. NO: 774) | (SEQ ID. | (SEQ ID. | clease | |
| | | | | NO: 775) | NO: 776) | | |
| 7a | therm_36 | LwaCas13a | GATTTAGACTACCCCAAAA | tcaggtgtat | GATTTAGACTAC | ther- | 7a |
| | | | ACGAAGGGGACTAAAACtca | caaccaata | CCCAAAAACGAA | mo- | |
| | | | ggtgtatcaaccaataatagtctga | atagtctga | GGGGACTAAAAC | nu- | |
| | | | (SEQ ID. NO: 777) | (SEQ ID. | (SEQ ID. | clease | |
| | | | | NO: 778) | NO: 779) | | |
| 7a | therm_37 | LwaCas13a | GATTTAGACTACCCCAAAA | tttcaggtgta | GATTTAGACTAC | ther- | 7a |
| | | | ACGAAGGGGACTAAAACttt | tcaaccaata | CCCAAAAACGAA | mo- | |
| | | | caggtgtatcaaccaataatagtct | atagtct | GGGGACTAAAAC | nu- | |
| | | | (SEQ ID. NO: 780) | (SEQ ID. | (SEQ ID. | clease | |
| | | | | NO: 781) | NO: 782) | | |
| 7a | therm_38 | LwaCas13a | GATTTAGACTACCCCAAAA | tgtttcaggt | GATTTAGACTAC | ther- | 7a |
| | | | ACGAAGGGGACTAAAACtgt | gtatcaacca | CCCAAAAACGAA | mo- | |
| | | | ttcaggtgtatcaaccaataatagt | ataatagt | GGGGACTAAAAC | nu- | |
| | | | (SEQ ID. NO: 783) | (SEQ ID. | (SEQ ID. | clease | |
| | | | | NO: 784) | NO: 785) | | |
| 7a | therm_39 | LwaCas13a | GATTTAGACTACCCCAAAA | tttgtttcagg | GATTTAGACTAC | ther- | 7a |
| | | | ACGAAGGGGACTAAAACttt | tgtatcaacc | CCCAAAAACGAA | mo- | |
| | | | gtttcaggtgtatcaaccaataata | aataata | GGGGACTAAAAC | nu- | |
| | | | (SEQ ID. NO: 786) | (SEQ ID. | (SEQ ID. | clease | |
| | | | | NO: 787) | NO: 788) | | |
| 7a | therm_40 | LwaCas13a | GATTTAGACTACCCCAAAA | gctttgtttca | GATTTAGACTAC | ther- | 7a |
| | | | ACGAAGGGGACTAAAACgct | ggtgtatcaa | CCCAAAAACGAA | mo- | |
| | | | ttgtttcaggtgtatcaaccaataa | ccaataa | GGGGACTAAAAC | nu- | |
| | | | (SEQ ID. NO: 789) | (SEQ ID. | (SEQ ID. | clease | |
| | | | | NO: 790) | NO: 791) | | |
| 7a | therm_41 | LwaCas13a | GATTTAGACTACCCCAAAA | atgctttgttt | GATTTAGACTAC | ther- | 7a |
| | | | ACGAAGGGGACTAAAACatg | caggtgtatc | CCCAAAAACGAA | mo- | |
| | | | ctttgtttcaggtgtatcaaccaat | aaccaat | GGGGACTAAAAC | nu- | |
| | | | (SEQ ID. NO: 792) | (SEQ ID. | (SEQ ID. | clease | |
| | | | | NO: 793) | NO: 794) | | |
| 7a | therm_42 | LwaCas13a | GATTTAGACTACCCCAAAA | ggatgctttg | GATTTAGACTAC | ther- | 7a |
| | | | ACGAAGGGGACTAAAACgga | tttcaggtgta | CCCAAAAACGAA | mo- | |
| | | | tgctttgtttcaggtgtatcaacca | tcaacca | GGGGACTAAAAC | nu- | |
| | | | (SEQ ID. NO: 795) | (SEQ ID. | (SEQ ID. | clease | |
| | | | | NO: 796) | NO: 797) | | |
| 7a | therm_43 | LwaCas13a | GATTTAGACTACCCCAAAA | taggatgcttt | GATTTAGACTAC | ther- | 7a |
| | | | ACGAAGGGGACTAAAACtag | gtttcaggtg | CCCAAAAACGAA | mo- | |
| | | | gatgctttgtttcaggtgtatcaac | tatcaac | GGGGACTAAAAC | nu- | |
| | | | (SEQ ID. NO: 798) | (SEQ ID. | (SEQ ID. | clease | |
| | | | | NO: 799) | NO: 800) | | |
| 7a | therm_44 | LwaCas13a | GATTTAGACTACCCCAAAA | tttaggatgct | GATTTAGACTAC | ther- | 7a |
| | | | ACGAAGGGGACTAAAACttt | ttgtttcaggt | CCCAAAAACGAA | mo- | |
| | | | aggatgctttgtttcaggtgtatca | gtatca | GGGGACTAAAAC | nu- | |
| | | | (SEQ ID. NO: 801) | (SEQ ID. | (SEQ ID. | clease | |
| | | | | NO: 802) | NO: 803) | | |
| 7a | therm_45 | LwaCas13a | GATTTAGACTACCCCAAAA | tttttaggatg | GATTTAGACTAC | ther- | 7a |
| | | | ACGAAGGGGACTAAAACtttt | ctttgtttcag | CCCAAAAACGAA | mo- | |
| | | | taggatgctttgtttcaggtgtat | gtgtat | GGGGACTAAAAC | nu- | |
| | | | (SEQ ID. NO: 804) | (SEQ ID. | (SEQ ID. | clease | |
| | | | | NO: 805) | NO: 806) | | |
| 7a | therm_46 | LwaCas13a | GATTTAGACTACCCCAAAA | cttttttagga | GATTTAGACTAC | ther- | 7a |
| | | | ACGAAGGGGACTAAAACctt | tgctttgtttc | CCCAAAAACGAA | mo- | |
| | | | ttttaggatgctttgtttcaggtgt | aggtgt | GGGGACTAAAAC | nu- | |
| | | | (SEQ ID. NO: 807) | (SEQ ID. | (SEQ ID. | clease | |
| | | | | NO: 808) | NO: 809) | | |
| 7a | therm_47 | LwaCas13a | GATTTAGACTACCCCAAAA | accttttttag | GATTTAGACTAC | ther- | 7a |
| | | | ACGAAGGGGACTAAAACacc | gatgctttgtt | CCCAAAAACGAA | mo- | |
| | | | ttttttaggatgctttgtttcaggt | tcaggt | GGGGACTAAAAC | nu- | |
| | | | (SEQ ID. NO: 810) | (SEQ ID. | (SEQ ID. | clease | |
| | | | | NO: 811) | NO: 812) | | |
| 7a | therm_48 | LwaCas13a | GATTTAGACTACCCCAAAA | acacctttttt | GATTTAGACTAC | ther- | 7a |
| | | | ACGAAGGGGACTAAAACaca | aggatgcttt | CCCAAAAACGAA | mo- | |
| | | | ccttttttaggatgctttgtttcag | gtttcag | GGGGACTAAAAC | nu- | |
| | | | (SEQ ID. NO: 813) | (SEQ ID. | (SEQ ID. | clease | |
| | | | | NO: 814) | NO: 815) | | |
| 7a | therm_49 | LwaCas13a | GATTTAGACTACCCCAAAA | ctacacctttt | GATTTAGACTAC | ther- | 7a |
| | | | ACGAAGGGGACTAAAACcta | ttaggatgctt | CCCAAAAACGAA | mo- | |
| | | | caccttttttaggatgctttgtttc | tgtttc | GGGGACTAAAAC | nu- | |
| | | | (SEQ ID. NO: 816) | (SEQ ID. | (SEQ ID. | clease | |
| | | | | NO: 817) | NO: 818) | | |
| 7a | therm_50 | LwaCas13a | GATTTAGACTACCCCAAAA | ctctacacctt | GATTTAGACTAC | ther- | 7a |
| | | | ACGAAGGGGACTAAAACctc | ttttaggatgc | CCCAAAAACGAA | mo- | |
| | | | tacaccttttttaggatgctttgtt | tttgtt | GGGGACTAAAAC | nu- | |
| | | | (SEQ ID. NO: 819) | (SEQ ID. | (SEQ ID. | clease | |
| | | | | NO: 820) | NO: 821) | | |
| 7a | therm_51 | LwaCas13a | GATTTAGACTACCCCAAAA | ttctctacacc | GATTTAGACTAC | ther- | 7a |
| | | | ACGAAGGGGACTAAAACttc | ttttttaggat | CCCAAAAACGAA | mo- | |
| | | | tctacaccttttttaggatgctttg | gctttg | GGGGACTAAAAC | nu- | |
| | | | (SEQ ID. NO: 822) | (SEQ ID. | (SEQ ID. | clease | |
| | | | | NO: 823) | NO: 824) | | |
| 7a | therm_52 | LwaCas13a | GATTTAGACTACCCCAAAA | atttctctaca | GATTTAGACTAC | ther- | 7a |
| | | | ACGAAGGGGACTAAAACatt | ccttttttagg | CCCAAAAACGAA | mo- | |
| | | | tctctacaccttttttaggatgctt | atgctt | GGGGACTAAAAC | nu- | |
| | | | (SEQ ID. NO: 825) | (SEQ ID. | (SEQ ID. | clease | |
| | | | | NO: 826) | NO: 827) | | |
| 7a | therm_53 | LwaCas13a | GATTTAGACTACCCCAAAA | atatttctcta | GATTTAGACTAC | ther- | 7a |
| | | | ACGAAGGGGACTAAAACata | cacctttttta | CCCAAAAACGAA | mo- | |
| | | | tttctctacaccttttttaggatgc | ggatgc | GGGGACTAAAAC | nu- | |
| | | | (SEQ ID. NO: 828) | (SEQ ID. | (SEQ ID. | clease | |
| | | | | NO: 829) | NO: 830) | | |
| 7a | therm_54 | LwaCas13a | GATTTAGACTACCCCAAAA | ccatatttctc | GATTTAGACTAC | ther- | 7a |
| | | | ACGAAGGGGACTAAAACcca | tacaccttttt | CCCAAAAACGAA | mo- | |
| | | | tatttctctacaccttttttaggat | taggat | GGGGACTAAAAC | nu- | |
| | | | (SEQ ID. NO: 831) | (SEQ ID. | (SEQ ID. | clease | |
| | | | | NO: 832) | NO: 833) | | |
| 7a | therm_55 | LwaCas13a | GATTTAGACTACCCCAAAA | gaccatattt | GATTTAGACTAC | ther- | 7a |
| | | | ACGAAGGGGACTAAAACgac | ctctacacctt | CCCAAAAACGAA | mo- | |
| | | | catatttctctacaccttttttagg | ttttagg | GGGGACTAAAAC | nu- | |
| | | | (SEQ ID. NO: 834) | (SEQ ID. | (SEQ ID. | clease | |
| | | | | NO: 835) | NO: 836) | | |
| 7a | therm_56 | LwaCas13a | GATTTAGACTACCCCAAAA | aggaccatat | GATTTAGACTAC | ther- | 7a |
| | | | ACGAAGGGGACTAAAACagg | ttctctacacc | CCCAAAAACGAA | mo- | |
| | | | accatatttctctacacctttttta | tttttta | GGGGACTAAAAC | nu- | |
| | | | (SEQ ID. NO: 837) | (SEQ ID. | (SEQ ID. | clease | |
| | | | | NO: 838) | NO: 839) | | |
| 7a | therm_57 | LwaCas13a | GATTTAGACTACCCCAAAA | tcaggaccat | GATTTAGACTAC | ther- | 7a |
| | | | ACGAAGGGGACTAAAACtca | atttctctaca | CCCAAAAACGAA | mo- | |
| | | | ggaccatatttctctacaccttttt | ccttttt | GGGGACTAAAAC | nu- | |
| | | | (SEQ ID. NO: 840) | (SEQ ID. | (SEQ ID. | clease | |
| | | | | NO: 841) | NO: 842) | | |
| 7a | therm_58 | LwaCas13a | GATTTAGACTACCCCAAAA | cttcaggacc | GATTTAGACTAC | ther- | 7a |
| | | | ACGAAGGGGACTAAAACctt | atatttctcta | CCCAAAAACGAA | mo- | |
| | | | caggaccatatttctctacaccttt | caccttt | GGGGACTAAAAC | nu- | |
| | | | (SEQ ID. NO: 843) | (SEQ ID. | (SEQ ID. | clease | |
| | | | | NO: 844) | NO: 845) | | |
| 7a | therm_59 | LwaCas13a | GATTTAGACTACCCCAAAA | tgcttcagga | GATTTAGACTAC | ther- | 7a |
| | | | ACGAAGGGGACTAAAACtgc | ccatatttctc | CCCAAAAACGAA | mo- | |
| | | | ttcaggaccatatttctctacacct | tacacct | GGGGACTAAAAC | nu- | |
| | | | (SEQ ID. NO: 846) | (SEQ ID. | (SEQ ID. | clease | |
| | | | | NO: 847) | NO: 848) | | |
| 7a | therm_60 | LwaCas13a | GATTTAGACTACCCCAAAA | cttgcttcag | GATTTAGACTAC | ther- | 7a |
| | | | ACGAAGGGGACTAAAACctt | gaccatattt | CCCAAAAACGAA | mo- | |
| | | | gcttcaggaccatatttctctacac | ctctacac | GGGGACTAAAAC | nu- | |
| | | | (SEQ ID. NO: 849) | (SEQ ID. | (SEQ ID. | clease | |
| | | | | NO: 850) | NO: 851) | | |
| 7a | therm_61 | LwaCas13a | GATTTAGACTACCCCAAAA | cacttgcttc | GATTTAGACTAC | ther- | 7a |
| | | | ACGAAGGGGACTAAAACcac | aggaccatat | CCCAAAAACGAA | mo- | |
| | | | ttgcttcaggaccatatttctctac | ttctctac | GGGGACTAAAAC | nu- | |
| | | | (SEQ ID. NO: 852) | (SEQ ID. | (SEQ ID. | clease | |
| | | | | NO: 853) | NO: 854) | | |
| 7a | therm_62 | LwaCas13a | GATTTAGACTACCCCAAAA | tgcacttgctt | GATTTAGACTAC | ther- | 7a |
| | | | ACGAAGGGGACTAAAACtgc | caggaccat | CCCAAAAACGAA | mo- | |
| | | | acttgcttcaggaccatatttctct | atttctct | GGGGACTAAAAC | nu- | |
| | | | (SEQ ID. NO: 855) | (SEQ ID. | (SEQ ID. | clease | |
| | | | | NO: 856) | NO: 857) | | |
| 7a | therm_63 | LwaCas13a | GATTTAGACTACCCCAAAA | aatgcacttg | GATTTAGACTAC | ther- | 7a |
| | | | ACGAAGGGGACTAAAACaat | cttcaggacc | CCCAAAAACGAA | mo- | |
| | | | gcacttgcttcaggaccatatttct | atatttct | GGGGACTAAAAC | nu- | |
| | | | (SEQ ID. NO: 858) | (SEQ ID. | (SEQ ID. | clease | |
| | | | | NO: 859) | NO: 860) | | |
| 7a | therm_64 | LwaCas13a | GATTTAGACTACCCCAAAA | taaatgcact | GATTTAGACTAC | ther- | 7a |
| | | | ACGAAGGGGACTAAAACtaa | tgcttcagga | CCCAAAAACGAA | mo- | |
| | | | atgcacttgcttcaggaccatattt | ccatattt | GGGGACTAAAAC | nu- | |
| | | | (SEQ ID. NO: 861) | (SEQ ID. | (SEQ ID. | clease | |
| | | | | NO: 862) | NO: 863) | | |
| 7a | therm_65 | LwaCas13a | GATTTAGACTACCCCAAAA | gtaaatgcac | GATTTAGACTAC | ther- | 7a |
| | | | ACGAAGGGGACTAAAACgta | ttgcttcagg | CCCAAAAACGAA | mo- | |
| | | | aatgcacttgcttcaggaccatatt | accatatt | GGGGACTAAAAC | nu- | |
| | | | (SEQ ID. NO: 864) | (SEQ ID. | (SEQ ID. | clease | |
| | | | | NO: 865) | NO: 866) | | |
| 7a | therm_66 | LwaCas13a | GATTTAGACTACCCCAAAA | cgtaaatgca | GATTTAGACTAC | ther- | 7a |
| | | | ACGAAGGGGACTAAAACcgt | cttgcttcag | CCCAAAAACGAA | mo- | |
| | | | aaatgcacttgcttcaggaccatat | gaccatat | GGGGACTAAAAC | nu- | |
| | | | (SEQ ID. NO: 867) | (SEQ ID. | (SEQ ID. | clease | |
| | | | | NO: 868) | NO: 869) | | |
| 7a | therm_67 | LwaCas13a | GATTTAGACTACCCCAAAA | tcgtaaatgc | GATTTAGACTAC | ther- | 7a |
| | | | ACGAAGGGGACTAAAACtcg | acttgcttca | CCCAAAAACGAA | mo- | |
| | | | taaatgcacttgcttcaggaccata | ggaccata | GGGGACTAAAAC | nu- | |
| | | | (SEQ ID. NO: 870) | (SEQ ID. | (SEQ ID. | clease | |
| | | | | NO: 871) | NO: 872) | | |
| 7a | therm_68 | LwaCas13a | GATTTAGACTACCCCAAAA | ttcgtaaatg | GATTTAGACTAC | ther- | 7a |
| | | | ACGAAGGGGACTAAAACttc | cacttgcttc | CCCAAAAACGAA | mo- | |
| | | | gtaaatgcacttgcttcaggaccat | aggaccat | GGGGACTAAAAC | nu- | |
| | | | (SEQ ID. NO: 873) | (SEQ ID. | (SEQ ID. | clease | |
| | | | | NO: 874) | NO: 875) | | |
| 7a | therm_69 | LwaCas13a | GATTTAGACTACCCCAAAA | tttcgtaaatg | GATTTAGACTAC | ther- | 7a |
| | | | ACGAAGGGGACTAAAACttt | cacttgcttc | CCCAAAAACGAA | mo- | |
| | | | cgtaaatgcacttgcttcaggacca | aggacca | GGGGACTAAAAC | nu- | |
| | | | (SEQ ID. NO: 876) | (SEQ ID. | (SEQ ID. | clease | |
| | | | | NO: 877) | NO: 878) | | |
| 7a | therm_70 | LwaCas13a | GATTTAGACTACCCCAAAA | ttttcgtaaat | GATTTAGACTAC | ther- | 7a |
| | | | ACGAAGGGGACTAAAACtttt | gcacttgctt | CCCAAAAACGAA | mo- | |
| | | | cgtaaatgcacttgcttcaggacc | caggacc | GGGGACTAAAAC | nu- | |
| | | | (SEQ ID. NO: 879) | (SEQ ID. | (SEQ ID. | clease | |
| | | | | NO: 880) | NO: 881) | | |
| 7a | therm_71 | LwaCas13a | GATTTAGACTACCCCAAAA | tttttcgtaaa | GATTTAGACTAC | ther- | 7a |
| | | | ACGAAGGGGACTAAAACtttt | tgcacttgctt | CCCAAAAACGAA | mo- | |
| | | | tegtaaatgcacttgcttcaggac | caggac | GGGGACTAAAAC | nu- | |
| | | | (SEQ ID. NO: 882) | (SEQ ID. | (SEQ ID. | clease | |
| | | | | NO: 883) | NO: 884) | | |
| 7a | therm_72 | LwaCas13a | GATTTAGACTACCCCAAAA | ctttttcgtaa | GATTTAGACTAC | ther- | 7a |
| | | | ACGAAGGGGACTAAAACctt | atgcacttgc | CCCAAAAACGAA | mo- | |
| | | | tttcgtaaatgcacttgcttcagga | ttcagga | GGGGACTAAAAC | nu- | |
| | | | (SEQ ID. NO: 885) | (SEQ ID. | (SEQ ID. | clease | |
| | | | | NO: 886) | NO: 887) | | |
| 7a | therm_73 | LwaCas13a | GATTTAGACTACCCCAAAA | tctttttcgta | GATTTAGACTAC | ther- | 7a |
| | | | ACGAAGGGGACTAAAACtct | aatgcacttgc | CCCAAAAACGAA | mo- | |
| | | | ttttcgtaaatgcacttgcttcagg | ttcagg | GGGGACTAAAAC | nu- | |
| | | | (SEQ ID. NO: 888) | (SEQ ID. | (SEQ ID. | clease | |
| | | | | NO: 889) | NO: 890) | | |
| 7a | therm_74 | LwaCas13a | GATTTAGACTACCCCAAAA | atctttttcgt | GATTTAGACTAC | ther- | 7a |
| | | | ACGAAGGGGACTAAAACatc | aaatgcacttg | CCCAAAAACGAA | mo- | |
| | | | tttttcgtaaatgcacttgcttcag | cttcag | GGGGACTAAAAC | nu- | |
| | | | (SEQ ID. NO: 891) | (SEQ ID. | (SEQ ID. | clease | |
| | | | | NO: 892) | NO: 893) | | |
| 7a | therm_75 | LwaCas13a | GATTTAGACTACCCCAAAA | catctttttcg | GATTTAGACTAC | ther- | 7a |
| | | | ACGAAGGGGACTAAAACcat | taaatgcactt | CCCAAAAACGAA | mo- | |
| | | | ctttttcgtaaatgcacttgcttca | gcttca | GGGGACTAAAAC | nu- | |
| | | | (SEQ ID. NO: 894) | (SEQ ID. | (SEQ ID. | clease | |
| | | | | NO: 895) | NO: 896) | | |
| 7a | therm_76 | LwaCas13a | GATTTAGACTACCCCAAAA | ccatctttttc | GATTTAGACTAC | ther- | 7a |
| | | | ACGAAGGGGACTAAAACcca | gtaaatgcac | CCCAAAAACGAA | mo- | |
| | | | tctttttcgtaaatgcacttgcttc | ttgcttc | GGGGACTAAAAC | nu- | |
| | | | (SEQ ID. NO: 897) | (SEQ ID. | (SEQ ID. | clease | |
| | | | | NO: 898) | NO: 899) | | |
| 7a | therm_77 | LwaCas13a | GATTTAGACTACCCCAAAA | accatcttttt | GATTTAGACTAC | ther- | 7a |
| | | | ACGAAGGGGACTAAAACacc | cgtaaatgca | CCCAAAAACGAA | mo- | |
| | | | atctttttcgtaaatgcacttgctt | cttgctt | GGGGACTAAAAC | nu- | |
| | | | (SEQ ID. NO: 900) | (SEQ ID. | (SEQ ID. | clease | |
| | | | | NO: 901) | NO: 902) | | |
| 7a | therm_78 | LwaCas13a | GATTTAGACTACCCCAAAA | taccatctttt | GATTTAGACTAC | ther- | 7a |
| | | | ACGAAGGGGACTAAAACtac | tcgtaaatgca | CCCAAAAACGAA | mo- | |
| | | | catctttttcgtaaatgcacttgct | cttgct | GGGGACTAAAAC | nu- | |
| | | | (SEQ ID. NO: 903) | (SEQ ID. | (SEQ ID. | clease | |
| | | | | NO: 904) | NO: 905) | | |
| 7a | therm_79 | LwaCas13a | GATTTAGACTACCCCAAAA | ctaccatcttt | GATTTAGACTAC | ther- | 7a |
| | | | ACGAAGGGGACTAAAACcta | ttcgtaaatg | CCCAAAAACGAA | mo- | |
| | | | ccatctttttcgtaaatgcacttgc | cacttgc | GGGGACTAAAAC | nu- | |
| | | | (SEQ ID. NO: 906) | (SEQ ID. | (SEQ ID. | clease | |
| | | | | NO: 907) | NO: 908) | | |
| 7a | therm_80 | LwaCas13a | GATTTAGACTACCCCAAAA | tctaccatctt | GATTTAGACTAC | ther- | 7a |
| | | | ACGAAGGGGACTAAAACtct | tttcgtaaatg | CCCAAAAACGAA | mo- | |
| | | | accatctttttcgtaaatgcacttg | cacttg | GGGGACTAAAAC | nu- | |
| | | | (SEQ ID. NO: 909) | (SEQ ID. | (SEQ ID. | clease | |
| | | | | NO: 910) | NO: 911) | | |
| 7a | therm_81 | LwaCas13a | GATTTAGACTACCCCAAAA | ttctaccatct | GATTTAGACTAC | ther- | 7a |
| | | | ACGAAGGGGACTAAAACttc | ttttcgtaaat | CCCAAAAACGAA | mo- | |
| | | | taccatctttttcgtaaatgcactt | gcactt | GGGGACTAAAAC | nu- | |
| | | | (SEQ ID. NO: 912) | (SEQ ID. | (SEQ ID. | clease | |
| | | | | NO: 913) | NO: 914) | | |
| 7a | therm_82 | LwaCas13a | GATTTAGACTACCCCAAAA | tttctaccatc | GATTTAGACTAC | ther- | 7a |
| | | | ACGAAGGGGACTAAAACttt | tttttcgtaaa | CCCAAAAACGAA | mo- | |
| | | | ctaccatctttttcgtaaatgcact | tgcact | GGGGACTAAAAC | nu- | |
| | | | (SEQ ID. NO: 915) | (SEQ ID. | (SEQ ID. | clease | |
| | | | | NO: 916) | NO: 917) | | |
| 7a | therm_83 | LwaCas13a | GATTTAGACTACCCCAAAA | ttttctaccat | GATTTAGACTAC | ther- | 7a |
| | | | ACGAAGGGGACTAAAACtttt | ctttttcgtaa | CCCAAAAACGAA | mo- | |
| | | | ctaccatctttttcgtaaatgcac | atgcac | GGGGACTAAAAC | nu- | |
| | | | (SEQ ID. NO: 918) | (SEQ ID. | (SEQ ID. | clease | |
| | | | | NO: 919) | NO: 920) | | |
| 7a | therm_84 | LwaCas13a | GATTTAGACTACCCCAAAA | attttctacca | GATTTAGACTAC | ther- | 7a |
| | | | ACGAAGGGGACTAAAACatt | tctttttcgta | CCCAAAAACGAA | mo- | |
| | | | ttctaccatctttttcgtaaatgca | aatgca | GGGGACTAAAAC | nu- | |
| | | | (SEQ ID. NO: 921) | (SEQ ID. | (SEQ ID. | clease | |
| | | | | NO: 922) | NO: 923) | | |
| 7a | therm_85 | LwaCas13a | GATTTAGACTACCCCAAAA | cattttctacc | GATTTAGACTAC | ther- | 7a |
| | | | ACGAAGGGGACTAAAACcat | atctttttcgt | CCCAAAAACGAA | mo- | |
| | | | tttctaccatctttttcgtaaatgc | aaatgc | GGGGACTAAAAC | nu- | |
| | | | (SEQ ID. NO: 924) | (SEQ ID. | (SEQ ID. | clease | |
| | | | | NO: 925) | NO: 926) | | |
| 7a | therm_86 | LwaCas13a | GATTTAGACTACCCCAAAA | gcattttctac | GATTTAGACTAC | ther- | 7a |
| | | | ACGAAGGGGACTAAAACgca | catctttttcg | CCCAAAAACGAA | mo- | |
| | | | ttttctaccatctttttcgtaaatg | taaatg | GGGGACTAAAAC | nu- | |
| | | | (SEQ ID. NO: 927) | (SEQ ID. | (SEQ ID. | clease | |
| | | | | NO: 928) | NO: 929) | | |
| 7a | therm_87 | LwaCas13a | GATTTAGACTACCCCAAAA | tgcattttcta | GATTTAGACTAC | ther- | 7a |
| | | | ACGAAGGGGACTAAAACtgc | ccatctttttc | CCCAAAAACGAA | mo- | |
| | | | attttctaccatctttttcgtaaat | gtaaat | GGGGACTAAAAC | nu- | |
| | | | (SEQ ID. NO: 930) | (SEQ ID. | (SEQ ID. | clease | |
| | | | | NO: 931) | NO: 932) | | |
| 7a | therm_88 | LwaCas13a | GATTTAGACTACCCCAAAA | ttgcattttct | GATTTAGACTAC | ther- | 7a |
| | | | ACGAAGGGGACTAAAACttg | accatcttttt | CCCAAAAACGAA | mo- | |
| | | | cattttctaccatctttttcgtaaa | cgtaaa | GGGGACTAAAAC | nu- | |
| | | | (SEQ ID. NO: 933) | (SEQ ID. | (SEQ ID. | clease | |
| | | | | NO: 934) | NO: 935) | | |
| 7a | therm_89 | LwaCas13a | GATTTAGACTACCCCAAAA | tttgcattttc | GATTTAGACTAC | ther- | 7a |
| | | | ACGAAGGGGACTAAAACttt | taccatctttt | CCCAAAAACGAA | mo- | |
| | | | gcattttctaccatctttttcgtaa | tcgtaa | GGGGACTAAAAC | nu- | |
| | | | (SEQ ID. NO: 936) | (SEQ ID. | (SEQ ID. | clease | |
| | | | | NO: 937) | NO: 938) | | |
| 7a | therm_90 | LwaCas13a | GATTTAGACTACCCCAAAA | ctttgcatttt | GATTTAGACTAC | ther- | 7a |
| | | | ACGAAGGGGACTAAAACctt | ctaccatcttt | CCCAAAAACGAA | mo- | |
| | | | tgcattttctaccatctttttcgta | ttcgta | GGGGACTAAAAC | nu- | |
| | | | (SEQ ID. NO: 939) | (SEQ ID. | (SEQ ID. | clease | |
| | | | | NO: 940) | NO: 941) | | |
| 7a | therm_91 | LwaCas13a | GATTTAGACTACCCCAAAA | tctttgcattt | GATTTAGACTAC | ther- | 7a |
| | | | ACGAAGGGGACTAAAACtct | tctaccatctt | CCCAAAAACGAA | mo- | |
| | | | ttgcattttctaccatctttttcgt | tttcgt | GGGGACTAAAAC | nu- | |
| | | | (SEQ ID. NO: 942) | (SEQ ID. | (SEQ ID. | clease | |
| | | | | NO: 943) | NO: 944) | | |
| 7a | therm_92 | LwaCas13a | GATTTAGACTACCCCAAAA | ttctttgcatt | GATTTAGACTAC | ther- | 7a |
| | | | ACGAAGGGGACTAAAACttc | ttctaccatct | CCCAAAAACGAA | mo- | |
| | | | tttgcattttctaccatctttttcg | ttttcg | GGGGACTAAAAC | nu- | |
| | | | (SEQ ID. NO: 945) | (SEQ ID. | (SEQ ID. | clease | |
| | | | | NO: 946) | NO: 947) | | |
| 7a | therm_93 | LwaCas13a | GATTTAGACTACCCCAAAA | tttctttgcat | GATTTAGACTAC | ther- | 7a |
| | | | ACGAAGGGGACTAAAACttt | tttctaccatc | CCCAAAAACGAA | mo- | |
| | | | ctttgcattttctaccatctttttc | tttttc | GGGGACTAAAAC | nu- | |
| | | | (SEQ ID. NO: 948) | (SEQ ID. | (SEQ ID. | clease | |
| | | | | NO: 949) | NO: 950) | | |
| 7a | therm_94 | LwaCas13a | GATTTAGACTACCCCAAAA | ttttctttgca | GATTTAGACTAC | ther- | 7a |
| | | | ACGAAGGGGACTAAAACtttt | ttttctaccat | CCCAAAAACGAA | mo- | |
| | | | ctttgcattttctaccatcttttt | cttttt | GGGGACTAAAAC | nu- | |
| | | | (SEQ ID. NO: 951) | (SEQ ID. | (SEQ ID. | clease | |
| | | | | NO: 952) | NO: 953) | | |
| 7a | therm_95 | LwaCas13a | GATTTAGACTACCCCAAAA | attttctttgc | GATTTAGACTAC | ther- | 7a |
| | | | ACGAAGGGGACTAAAACatt | attttctacca | CCCAAAAACGAA | mo- | |
| | | | ttctttgcattttctaccatctttt | tctttt | GGGGACTAAAAC | nu- | |
| | | | (SEQ ID. NO: 954) | (SEQ ID. | (SEQ ID. | clease | |
| | | | | NO: 955) | NO: 956) | | |
| 1b | zika_00 | LwaCas13a | GATTTAGACTACCCCAAAA | tgttgttccag | GATTTAGACTAC | Zika | 1b |
| | | | ACGAAGGGGACTAAAACtgt | tgtggagttc | CCCAAAAACGAA | ssRNA | |
| | | | tgttccagtgtggagttccggtgtc | cggtgtc | GGGGACTAAAAC | | |
| | | | (SEQ ID. NO: 957) | (SEQ ID. | (SEQ ID. | | |
| | | | | NO: 958) | NO: 959) | | |
| 1b | zika_01 | LwaCas13a | GATTTAGACTACCCCAAAA | ttgttgttcca | GATTTAGACTAC | Zika | 1b |
| | | | ACGAAGGGGACTAAAACttg | gtgtggagtt | CCCAAAAACGAA | ssRNA | |
| | | | ttgttccagtgtggagttccggtgt | ccggtgt | GGGGACTAAAAC | | |
| | | | (SEQ ID. NO: 960) | (SEQ ID. | (SEQ ID. | | |
| | | | | NO: 961) | NO: 962) | | |
| 1b | zika_02 | LwaCas13a | GATTTAGACTACCCCAAAA | tttgttgttcc | GATTTAGACTAC | Zika | 1b |
| | | | ACGAAGGGGACTAAAACttt | agtgtggagt | CCCAAAAACGAA | ssRNA | |
| | | | gttgttccagtgtggagttccggtg | tccggtg | GGGGACTAAAAC | | |
| | | | (SEQ ID. NO: 963) | (SEQ ID. | (SEQ ID. | | |
| | | | | NO: 964) | NO: 965) | | |
| 1b | zika_03 | LwaCas13a | GATTTAGACTACCCCAAAA | ctttgttgttc | GATTTAGACTAC | Zika | 1b |
| | | | ACGAAGGGGACTAAAACctt | cagtgtgga | CCCAAAAACGAA | ssRNA | |
| | | | tgttgttccagtgtggagttccggt | gttccggt | GGGGACTAAAAC | | |
| | | | (SEQ ID. NO: 966) | (SEQ ID. | (SEQ ID. | | |
| | | | | NO: 967) | NO: 968) | | |
| 1b | zika_04 | LwaCas13a | GATTTAGACTACCCCAAAA | tctttgttgtt | GATTTAGACTAC | Zika | 1b |
| | | | ACGAAGGGGACTAAAACtct | ccagtgtgga | CCCAAAAACGAA | ssRNA | |
| | | | ttgttgttccagtgtggagttccgg | gttccgg | GGGGACTAAAAC | | |
| | | | (SEQ ID. NO: 969) | (SEQ ID. | (SEQ ID. | | |
| | | | | NO: 970) | NO: 971) | | |
| 1b | zika_05 | LwaCas13a | GATTTAGACTACCCCAAAA | ttctttgttgt | GATTTAGACTAC | Zika | 1b |
| | | | ACGAAGGGGACTAAAACttc | tccagtgtgg | CCCAAAAACGAA | ssRNA | |
| | | | tttgttgttccagtgtggagttccg | agttccg | GGGGACTAAAAC | | |
| | | | (SEQ ID. NO: 972) | (SEQ ID. | (SEQ ID. | | |
| | | | | NO: 973) | NO: 974) | | |
| 1b | zika_06 | LwaCas13a | GATTTAGACTACCCCAAAA | cttctttgttg | GATTTAGACTAC | Zika | 1b |
| | | | ACGAAGGGGACTAAAACctt | ttccagtgtgg | CCCAAAAACGAA | ssRNA | |
| | | | ctttgttgttccagtgtggagttcc | agttcc | GGGGACTAAAAC | | |
| | | | (SEQ ID. NO: 975) | (SEQ ID. | (SEQ ID. | | |
| | | | | NO: 976) | NO: 977) | | |
| 1b | zika_07 | LwaCas13a | GATTTAGACTACCCCAAAA | gcttctttgtt | GATTTAGACTAC | Zika | 1b |
| | | | ACGAAGGGGACTAAAACgct | gttccagtgt | CCCAAAAACGAA | ssRNA | |
| | | | tetttgttgttccagtgtggagttc | ggagttc | GGGGACTAAAAC | | |
| | | | (SEQ ID. NO: 978) | (SEQ ID. | (SEQ ID. | | |
| | | | | NO: 979) | NO: 980) | | |
| 1b | zika_08 | LwaCas13a | GATTTAGACTACCCCAAAA | tgcttctttgt | GATTTAGACTAC | Zika | 1b |
| | | | ACGAAGGGGACTAAAACtgc | tgttccagtgt | CCCAAAAACGAA | ssRNA | |
| | | | ttctttgttgttccagtgtggagtt | ggagtt | GGGGACTAAAAC | | |
| | | | (SEQ ID. NO: 981) | (SEQ ID. | (SEQ ID. | | |
| | | | | NO: 982) | NO: 983) | | |
| 1b | zika_09 | LwaCas13a | GATTTAGACTACCCCAAAA | gtgcttctttg | GATTTAGACTAC | Zika | 1b |
| | | | ACGAAGGGGACTAAAACgtg | ttgttccagtg | CCCAAAAACGAA | ssRNA | |
| | | | cttctttgttgttccagtgtggagt | tggagt | GGGGACTAAAAC | | |
| | | | (SEQ ID. NO: 984) | (SEQ ID. | (SEQ ID. | | |
| | | | | NO: 985) | NO: 986) | | |
| 1b | zika_10 | LwaCas13a | GATTTAGACTACCCCAAAA | agtgcttcttt | GATTTAGACTAC | Zika | 1b |
| | | | ACGAAGGGGACTAAAACagt | gttgttccagt | CCCAAAAACGAA | ssRNA | |
| | | | gcttctttgttgttccagtgtggag | gtggag | GGGGACTAAAAC | | |
| | | | (SEQ ID. NO: 987) | (SEQ ID. | (SEQ ID. | | |
| | | | | NO: 988) | NO: 989) | | |
| 1b | zika_11 | LwaCas13a | GATTTAGACTACCCCAAAA | cagtgcttctt | GATTTAGACTAC | Zika | 1b |
| | | | ACGAAGGGGACTAAAACcag | tgttgttccag | CCCAAAAACGAA | ssRNA | |
| | | | tgcttctttgttgttccagtgtgga | tgtgga | GGGGACTAAAAC | | |
| | | | (SEQ ID. NO: 990) | (SEQ ID. | (SEQ ID. | | |
| | | | | NO: 991) | NO: 992) | | |
| 1b | zika_12 | LwaCas13a | GATTTAGACTACCCCAAAA | ccagtgcttc | GATTTAGACTAC | Zika | 1b |
| | | | ACGAAGGGGACTAAAACcca | tttgttgttcc | CCCAAAAACGAA | ssRNA | |
| | | | gtgcttctttgttgttccagtgtgg | agtgtgg | GGGGACTAAAAC | | |
| | | | (SEQ ID. NO: 993) | (SEQ ID. | (SEQ ID. | | |
| | | | | NO: 994) | NO: 995) | | |
| 1b | zika_13 | LwaCas13a | GATTTAGACTACCCCAAAA | accagtgctt | GATTTAGACTAC | Zika | 1b |
| | | | ACGAAGGGGACTAAAACacc | ctttgttgttc | CCCAAAAACGAA | ssRNA | |
| | | | agtgcttctttgttgttccagtgtg | cagtgtg | GGGGACTAAAAC | | |
| | | | (SEQ ID. NO: 996) | (SEQ ID. | (SEQ ID. | | |
| | | | | NO: 997) | NO: 998) | | |
| 1b | zika_14 | LwaCas13a | GATTTAGACTACCCCAAAA | taccagtgct | GATTTAGACTAC | Zika | 1b |
| | | | ACGAAGGGGACTAAAACtac | tctttgttgtt | CCCAAAAACGAA | ssRNA | |
| | | | cagtgcttctttgttgttccagtgt | ccagtgt | GGGGACTAAAAC | | |
| | | | (SEQ ID. NO: 999) | (SEQ ID. | (SEQ ID. | | |
| | | | | NO: | NO: 1001) | | |
| | | | | 1000) | | | |
| 1b | zika_15 | LwaCas13a | GATTTAGACTACCCCAAAA | ctaccagtgc | GATTTAGACTAC | Zika | 1b |
| | | | ACGAAGGGGACTAAAACcta | ttetttgttgt | CCCAAAAACGAA | ssRNA | |
| | | | ccagtgcttctttgttgttccagtg | tccagtg | GGGGACTAAAAC | | |
| | | | (SEQ ID. NO: 1002) | (SEQ ID. | (SEQ ID. | | |
| | | | | NO: | NO: 1004) | | |
| | | | | 1003) | | | |
| 1b | zika_16 | LwaCas13a | GATTTAGACTACCCCAAAA | tctaccagtg | GATTTAGACTAC | Zika | 1b |
| | | | ACGAAGGGGACTAAAACtct | cttctttgttg | CCCAAAAACGAA | ssRNA | |
| | | | accagtgcttctttgttgttccagt | ttccagt | GGGGACTAAAAC | | |
| | | | (SEQ ID. NO: 1005) | (SEQ ID. | (SEQ ID. | | |
| | | | | NO: | NO: 1007) | | |
| | | | | 1006) | | | |
| 1b | zika_17 | LwaCas13a | GATTTAGACTACCCCAAAA | ctctaccagt | GATTTAGACTAC | Zika | 1b |
| | | | ACGAAGGGGACTAAAACctc | gcttctttgtt | CCCAAAAACGAA | ssRNA | |
| | | | taccagtgcttctttgttgttccag | gttccag | GGGGACTAAAAC | | |
| | | | (SEQ ID. NO: 1008) | (SEQ ID. | (SEQ ID. | | |
| | | | | NO: | NO: 1010) | | |
| | | | | 1009) | | | |
| 1b | zika_18 | LwaCas13a | GATTTAGACTACCCCAAAA | actctaccag | GATTTAGACTAC | Zika | 1b |
| | | | ACGAAGGGGACTAAAACact | tgcttctttgt | CCCAAAAACGAA | ssRNA | |
| | | | ctaccagtgcttctttgttgttcca | tgttcca | GGGGACTAAAAC | | |
| | | | (SEQ ID. NO: 1011) | (SEQ ID. | (SEQ ID. | | |
| | | | | NO: | NO: 1013) | | |
| | | | | 1012) | | | |
| 1b | zika_19 | LwaCas13a | GATTTAGACTACCCCAAAA | aactctacca | GATTTAGACTAC | Zika | 1b |
| | | | ACGAAGGGGACTAAAACaac | gtgcttctttg | CCCAAAAACGAA | ssRNA | |
| | | | tctaccagtgcttctttgttgttcc | ttgttcc | GGGGACTAAAAC | | |
| | | | (SEQ ID. NO: 1014) | (SEQ ID. | (SEQ ID. | | |
| | | | | NO: | NO: 1016) | | |
| | | | | 1015) | | | |
| 1b | zika_20 | LwaCas13a | GATTTAGACTACCCCAAAA | tgaactctac | GATTTAGACTAC | Zika | 1b |
| | | | ACGAAGGGGACTAAAACtga | cagtgcttctt | CCCAAAAACGAA | ssRNA | |
| | | | actctaccagtgcttctttgttgtt | tgttgtt | GGGGACTAAAAC | | |
| | | | (SEQ ID. NO: 1017) | (SEQ ID. | (SEQ ID. | | |
| | | | | NO: | NO: 1019) | | |
| | | | | 1018) | | | |
| 1b | zika_21 | LwaCas13a | GATTTAGACTACCCCAAAA | cttgaactct | GATTTAGACTAC | Zika | 1b |
| | | | ACGAAGGGGACTAAAACctt | accagtgctt | CCCAAAAACGAA | ssRNA | |
| | | | gaactctaccagtgcttctttgttg | ctttgttg | GGGGACTAAAAC | | |
| | | | (SEQ ID. NO: 1020) | (SEQ ID. | (SEQ ID. | | |
| | | | | NO: | NO: 1022) | | |
| | | | | 1021) | | | |
| 1b | zika_22 | LwaCas13a | GATTTAGACTACCCCAAAA | tccttgaact | GATTTAGACTAC | Zika | 1b |
| | | | ACGAAGGGGACTAAAACtcc | ctaccagtgc | CCCAAAAACGAA | ssRNA | |
| | | | ttgaactctaccagtgcttctttgt | ttctttgt | GGGGACTAAAAC | | |
| | | | (SEQ ID. NO: 1023) | (SEQ ID. | (SEQ ID. | | |
| | | | | NO: | NO: 1025) | | |
| | | | | 1024) | | | |
| 1b | zika_23 | LwaCas13a | GATTTAGACTACCCCAAAA | cgtccttgaa | GATTTAGACTAC | Zika | 1b |
| | | | ACGAAGGGGACTAAAACcgt | ctctaccagt | CCCAAAAACGAA | ssRNA | |
| | | | ccttgaactctaccagtgcttcttt | gcttcttt | GGGGACTAAAAC | | |
| | | | (SEQ ID. NO: 1026) | (SEQ ID. | (SEQ ID. | | |
| | | | | NO: | NO: 1028) | | |
| | | | | 1027) | | | |
| 1b | zika_24 | LwaCas13a | GATTTAGACTACCCCAAAA | tgcgtccttg | GATTTAGACTAC | Zika | 1b |
| | | | ACGAAGGGGACTAAAACtgc | aactctacca | CCCAAAAACGAA | ssRNA | |
| | | | gtccttgaactctaccagtgcttct | gtgcttct | GGGGACTAAAAC | | |
| | | | (SEQ ID. NO: 1029) | (SEQ ID. | (SEQ ID. | | |
| | | | | NO: | NO: 1031) | | |
| | | | | 1030) | | | |
| 1b | zika_25 | LwaCas13a | GATTTAGACTACCCCAAAA | tgtgegtcctt | GATTTAGACTAC | Zika | 1b |
| | | | ACGAAGGGGACTAAAACtgt | gaactctacc | CCCAAAAACGAA | ssRNA | |
| | | | gegtccttgaactctaccagtgctt | agtgctt | GGGGACTAAAAC | | |
| | | | (SEQ ID. NO: 1032) | (SEQ ID. | (SEQ ID. | | |
| | | | | NO: | NO: 1034) | | |
| | | | | 1033) | | | |
| 1b | zika_26 | LwaCas13a | GATTTAGACTACCCCAAAA | catgtgcgtc | GATTTAGACTAC | Zika | 1b |
| | | | ACGAAGGGGACTAAAACcat | cttgaactct | CCCAAAAACGAA | ssRNA | |
| | | | gtgcgtccttgaactctaccagtgc | accagtgc | GGGGACTAAAAC | | |
| | | | (SEQ ID. NO: 1035) | (SEQ ID. | (SEQ ID. | | |
| | | | | NO: | NO: 1037) | | |
| | | | | 1036) | | | |
| 1b | zika_27 | LwaCas13a | GATTTAGACTACCCCAAAA | ggcatgtgc | GATTTAGACTAC | Zika | 1b |
| | | | ACGAAGGGGACTAAAACggc | gtccttgaac | CCCAAAAACGAA | ssRNA | |
| | | | atgtgcgtccttgaactctaccagt | tctaccagt | GGGGACTAAAAC | | |
| | | | (SEQ ID. NO: 1038) | (SEQ ID. | (SEQ ID. | | |
| | | | | NO: | NO: 1040) | | |
| | | | | 1039) | | | |
| 1b | zika_28 | LwaCas13a | GATTTAGACTACCCCAAAA | ttggcatgtg | GATTTAGACTAC | Zika | 1b |
| | | | ACGAAGGGGACTAAAACttg | cgtccttgaa | CCCAAAAACGAA | ssRNA | |
| | | | gcatgtgcgtccttgaactctacca | ctctacca | GGGGACTAAAAC | | |
| | | | (SEQ ID. NO: 1041) | (SEQ ID. | (SEQ ID. | | |
| | | | | NO: | NO: 1043) | | |
| | | | | 1042) | | | |
| 1b | zika_29 | LwaCas13a | GATTTAGACTACCCCAAAA | ttttggcatgt | GATTTAGACTAC | Zika | 1b |
| | | | ACGAAGGGGACTAAAACtttt | gcgtccttga | CCCAAAAACGAA | ssRNA | |
| | | | ggcatgtgcgtccttgaactctac | actctac | GGGGACTAAAAC | | |
| | | | (SEQ ID. NO: 1044) | (SEQ ID. | (SEQ ID. | | |
| | | | | NO: | NO: 1046) | | |
| | | | | 1045) | | | |
| 1b | zika_30 | LwaCas13a | GATTTAGACTACCCCAAAA | ccttttggcat | GATTTAGACTAC | Zika | 1b |
| | | | ACGAAGGGGACTAAAACcct | gtgcgtcctt | CCCAAAAACGAA | ssRNA | |
| | | | tttggcatgtgegtccttgaactct | gaactct | GGGGACTAAAAC | | |
| | | | (SEQ ID. NO: 1047) | (SEQ ID. | (SEQ ID. | | |
| | | | | NO: | NO: 1049) | | |
| | | | | 1048) | | | |
| 1b | zika_31 | LwaCas13a | GATTTAGACTACCCCAAAA | tgccttttggc | GATTTAGACTAC | Zika | 1b |
| | | | ACGAAGGGGACTAAAACtgc | atgtgcgtcc | CCCAAAAACGAA | ssRNA | |
| | | | cttttggcatgtgcgtccttgaact | ttgaact | GGGGACTAAAAC | | |
| | | | (SEQ ID. NO: 1050) | (SEQ ID. | (SEQ ID. | | |
| | | | | NO: | NO: 1052) | | |
| | | | | 1051) | | | |
| 1b | zika_32 | LwaCas13a | GATTTAGACTACCCCAAAA | tttgccttttg | GATTTAGACTAC | Zika | 1b |
| | | | ACGAAGGGGACTAAAACttt | gcatgtgcgt | CCCAAAAACGAA | ssRNA | |
| | | | gccttttggcatgtgcgtccttgaa | ccttgaa | GGGGACTAAAAC | | |
| | | | (SEQ ID. NO: 1053) | (SEQ ID. | (SEQ ID. | | |
| | | | | NO: | NO: 1055) | | |
| | | | | 1054) | | | |
| 1b | zika_33 | LwaCas13a | GATTTAGACTACCCCAAAA | agtttgccttt | GATTTAGACTAC | Zika | 1b |
| | | | ACGAAGGGGACTAAAACagt | tggcatgtgc | CCCAAAAACGAA | ssRNA | |
| | | | ttgccttttggcatgtgcgtccttg | gtccttg | GGGGACTAAAAC | | |
| | | | (SEQ ID. NO: 1056) | (SEQ ID. | (SEQ ID. | | |
| | | | | NO: | NO: 1058) | | |
| | | | | 1057) | | | |
| 1b | zika_34 | LwaCas13a | GATTTAGACTACCCCAAAA | acagtttgcc | GATTTAGACTAC | Zika | 1b |
| | | | ACGAAGGGGACTAAAACaca | ttttggcatgt | CCCAAAAACGAA | ssRNA | |
| | | | gtttgccttttggcatgtgcgtcct | gcgtcct | GGGGACTAAAAC | | |
| | | | (SEQ ID. NO: 1059) | (SEQ ID. | (SEQ ID. | | |
| | | | | NO: | NO: 1061) | | |
| | | | | 1060) | | | |
| 1b | zika_35 | LwaCas13a | GATTTAGACTACCCCAAAA | cgacagtttg | GATTTAGACTAC | Zika | 1b |
| | | | ACGAAGGGGACTAAAACcga | ccttttggcat | CCCAAAAACGAA | ssRNA | |
| | | | cagtttgccttttggcatgtgcgtc | gtgcgtc | GGGGACTAAAAC | | |
| | | | (SEQ ID. NO: 1062) | (SEQ ID. | (SEQ ID. | | |
| | | | | NO: | NO: 1064) | | |
| | | | | 1063) | | | |
| 1b | zika_36 | LwaCas13a | GATTTAGACTACCCCAAAA | cacgacagtt | GATTTAGACTAC | Zika | 1b |
| | | | ACGAAGGGGACTAAAACcac | tgccttttggc | CCCAAAAACGAA | ssRNA | |
| | | | gacagtttgccttttggcatgtgcg | atgtgcg | GGGGACTAAAAC | | |
| | | | (SEQ ID. NO: 1065) | (SEQ ID. | (SEQ ID. | | |
| | | | | NO: | NO: 1067) | | |
| | | | | 1066) | | | |
| 1b | zika_37 | LwaCas13a | GATTTAGACTACCCCAAAA | accacgaca | GATTTAGACTAC | Zika | 1b |
| | | | ACGAAGGGGACTAAAACacc | gtttgcctttt | CCCAAAAACGAA | ssRNA | |
| | | | acgacagtttgccttttggcatgtg | ggcatgtg | GGGGACTAAAAC | | |
| | | | (SEQ ID. NO: 1068) | (SEQ ID. | (SEQ ID. | | |
| | | | | NO: | NO: 1070) | | |
| | | | | 1069) | | | |
| 1b | zika_38 | LwaCas13a | GATTTAGACTACCCCAAAA | gaaccacga | GATTTAGACTAC | Zika | 1b |
| | | | ACGAAGGGGACTAAAACgaa | cagtttgcctt | CCCAAAAACGAA | ssRNA | |
| | | | ccacgacagtttgccttttggcatg | ttggcatg | GGGGACTAAAAC | | |
| | | | (SEQ ID. NO: 1071) | (SEQ ID. | (SEQ ID. | | |
| | | | | NO: | NO: 1073) | | |
| | | | | 1072) | | | |
| 1b | zika_39 | LwaCas13a | GATTTAGACTACCCCAAAA | tagaaccac | GATTTAGACTAC | Zika | 1b |
| | | | ACGAAGGGGACTAAAACtag | gacagtttgc | CCCAAAAACGAA | ssRNA | |
| | | | aaccacgacagtttgccttttggca | cttttggca | GGGGACTAAAAC | | |
| | | | (SEQ ID. NO: 1074) | (SEQ ID. | (SEQ ID. | | |
| | | | | NO: | NO: 1076) | | |
| | | | | 1075) | | | |
| 1b | zika_40 | LwaCas13a | GATTTAGACTACCCCAAAA | cctagaacc | GATTTAGACTAC | Zika | 1b |
| | | | ACGAAGGGGACTAAAACcct | acgacagttt | CCCAAAAACGAA | ssRNA | |
| | | | agaaccacgacagtttgccttttgg | gccttttgg | GGGGACTAAAAC | | |
| | | | (SEQ ID. NO: 1077) | (SEQ ID. | (SEQ ID. | | |
| | | | | NO: | NO: 1079) | | |
| | | | | 1078) | | | |
| 1b | zika_41 | LwaCas13a | GATTTAGACTACCCCAAAA | tccctagaac | GATTTAGACTAC | Zika | 1b |
| | | | ACGAAGGGGACTAAAACtcc | cacgacagtt | CCCAAAAACGAA | ssRNA | |
| | | | ctagaaccacgacagtttgcctttt | tgcctttt | GGGGACTAAAAC | | |
| | | | (SEQ ID. NO: 1080) | (SEQ ID. | (SEQ ID. | | |
| | | | | NO: | NO: 1082) | | |
| | | | | 1081) | | | |
| 1b | zika_42 | LwaCas13a | GATTTAGACTACCCCAAAA | actccctaga | GATTTAGACTAC | Zika | 1b |
| | | | ACGAAGGGGACTAAAACact | accacgaca | CCCAAAAACGAA | ssRNA | |
| | | | ccctagaaccacgacagtttgcctt | gtttgcctt | GGGGACTAAAAC | | |
| | | | (SEQ ID. NO: 1083) | (SEQ ID. | (SEQ ID. | | |
| | | | | NO: | NO: 1085) | | |
| | | | | 1084) | | | |
| 1b | zika_43 | LwaCas13a | GATTTAGACTACCCCAAAA | tgactcccta | GATTTAGACTAC | Zika | 1b |
| | | | ACGAAGGGGACTAAAACtga | gaaccacga | CCCAAAAACGAA | ssRNA | |
| | | | ctccctagaaccacgacagtttgcc | cagtttgcc | GGGGACTAAAAC | | |
| | | | (SEQ ID. NO: 1086) | (SEQ ID. | (SEQ ID. | | |
| | | | | NO: | NO: 1088) | | |
| | | | | 1087) | | | |
| 1b | zika_44 | LwaCas13a | GATTTAGACTACCCCAAAA | cttgactccc | GATTTAGACTAC | Zika | 1b |
| | | | ACGAAGGGGACTAAAACctt | tagaaccac | CCCAAAAACGAA | ssRNA | |
| | | | gactccctagaaccacgacagtttg | gacagtttg | GGGGACTAAAAC | | |
| | | | (SEQ ID. NO: 1089) | (SEQ ID. | (SEQ ID. | | |
| | | | | NO: | NO: 1091) | | |
| | | | | 1090) | | | |
| 1b | zika_45 | LwaCas13a | GATTTAGACTACCCCAAAA | ttcttgactcc | GATTTAGACTAC | Zika | 1b |
| | | | ACGAAGGGGACTAAAACttc | ctagaacca | CCCAAAAACGAA | ssRNA | |
| | | | ttgactccctagaaccacgacagtt | cgacagtt | GGGGACTAAAAC | | |
| | | | (SEQ ID. NO: 1092) | (SEQ ID. | (SEQ ID. | | |
| | | | | NO: | NO: 1094) | | |
| | | | | 1093) | | | |
| 1b | zika_46 | LwaCas13a | GATTTAGACTACCCCAAAA | ccttcttgact | GATTTAGACTAC | Zika | 1b |
| | | | ACGAAGGGGACTAAAACcct | ccctagaac | CCCAAAAACGAA | ssRNA | |
| | | | tcttgactccctagaaccacgacag | cacgacag | GGGGACTAAAAC | | |
| | | | (SEQ ID. NO: 1095) | (SEQ ID. | (SEQ ID. | | |
| | | | | NO: | NO: 1097) | | |
| | | | | 1096) | | | |
| 1b | zika_47 | LwaCas13a | GATTTAGACTACCCCAAAA | ctccttcttga | GATTTAGACTAC | Zika | 1b |
| | | | ACGAAGGGGACTAAAACctc | ctccctagaa | CCCAAAAACGAA | ssRNA | |
| | | | cttcttgactccctagaaccacgac | ccacgac | GGGGACTAAAAC | | |
| | | | (SEQ ID. NO: 1098) | (SEQ ID. | (SEQ ID. | | |
| | | | | NO: | NO: 1100) | | |
| | | | | 1099) | | | |
| 1b | zika_48 | LwaCas13a | GATTTAGACTACCCCAAAA | tgctccttctt | GATTTAGACTAC | Zika | 1b |
| | | | ACGAAGGGGACTAAAACtgc | gactccctag | CCCAAAAACGAA | ssRNA | |
| | | | tecttcttgactccctagaaccacg | aaccacg | GGGGACTAAAAC | | |
| | | | (SEQ ID. NO: 1101) | (SEQ ID. | (SEQ ID. | | |
| | | | | NO: | NO: 1103) | | |
| | | | | 1102) | | | |
| 1b | zika_49 | LwaCas13a | GATTTAGACTACCCCAAAA | actgctcctt | GATTTAGACTAC | Zika | 1b |
| | | | ACGAAGGGGACTAAAACact | cttgactccc | CCCAAAAACGAA | ssRNA | |
| | | | gctccttcttgactccctagaacca | tagaacca | GGGGACTAAAAC | | |
| | | | (SEQ ID. NO: 1104) | (SEQ ID. | (SEQ ID. | | |
| | | | | NO: | NO: 1106) | | |
| | | | | 1105) | | | |
| 1b | zika_50 | LwaCas13a | GATTTAGACTACCCCAAAA | gaactgctcc | GATTTAGACTAC | Zika | 1b |
| | | | ACGAAGGGGACTAAAACgaa | ttcttgactcc | CCCAAAAACGAA | ssRNA | |
| | | | ctgctccttcttgactccctagaac | ctagaac | GGGGACTAAAAC | | |
| | | | (SEQ ID. NO: 1107) | (SEQ ID. | (SEQ ID. | | |
| | | | | NO: | NO: 1109) | | |
| | | | | 1108) | | | |
| 1b | zika_51 | LwaCas13a | GATTTAGACTACCCCAAAA | gtgaactgct | GATTTAGACTAC | Zika | 1b |
| | | | ACGAAGGGGACTAAAACgtg | ccttcttgact | CCCAAAAACGAA | ssRNA | |
| | | | aactgctccttcttgactccctaga | ccctaga | GGGGACTAAAAC | | |
| | | | (SEQ ID. NO: 1110) | (SEQ ID. | (SEQ ID. | | |
| | | | | NO: | NO: 1112) | | |
| | | | | 1111) | | | |
| 1b | zika_52 | LwaCas13a | GATTTAGACTACCCCAAAA | gtgtgaactg | GATTTAGACTAC | Zika | 1b |
| | | | ACGAAGGGGACTAAAACgtg | ctccttcttga | CCCAAAAACGAA | ssRNA | |
| | | | tgaactgctccttcttgactcccta | ctcccta | GGGGACTAAAAC | | |
| | | | (SEQ ID. NO: 1113) | (SEQ ID. | (SEQ ID. | | |
| | | | | NO: | NO: 1115) | | |
| | | | | 1114) | | | |
| 1b | zika_53 | LwaCas13a | GATTTAGACTACCCCAAAA | ccgtgtgaa | GATTTAGACTAC | Zika | 1b |
| | | | ACGAAGGGGACTAAAACccg | ctgctccttct | CCCAAAAACGAA | ssRNA | |
| | | | tgtgaactgctccttcttgactccc | tgactccc | GGGGACTAAAAC | | |
| | | | (SEQ ID. NO: 1116) | (SEQ ID. | (SEQ ID. | | |
| | | | | NO: | NO: 1118) | | |
| | | | | 1117) | | | |
| 1b | zika_54 | LwaCas13a | GATTTAGACTACCCCAAAA | ggccgtgtg | GATTTAGACTAC | Zika | 1b |
| | | | ACGAAGGGGACTAAAACggc | aactgctcct | CCCAAAAACGAA | ssRNA | |
| | | | cgtgtgaactgctccttcttgactc | tcttgactc | GGGGACTAAAAC | | |
| | | | (SEQ ID. NO: 1119) | (SEQ ID. | (SEQ ID. | | |
| | | | | NO: | NO: 1121) | | |
| | | | | 1120) | | | |
| 1b | zika_55 | LwaCasl3a | GATTTAGACTACCCCAAAA | agggccgtg | GATTTAGACTAC | Zika | 1b |
| | | | ACGAAGGGGACTAAAACagg | tgaactgctc | CCCAAAAACGAA | ssRNA | |
| | | | gccgtgtgaactgctccttcttgac | cttcttgac | GGGGACTAAAAC | | |
| | | | (SEQ ID. NO: 1122) | (SEQ ID. | (SEQ ID. | | |
| | | | | NO: | NO: 1124) | | |
| | | | | 1123) | | | |
| 1b | zika_56 | LwaCasl3a | GATTTAGACTACCCCAAAA | caagggccg | GATTTAGACTAC | Zika | 1b |
| | | | ACGAAGGGGACTAAAACcaa | tgtgaactgc | CCCAAAAACGAA | ssRNA | |
| | | | gggccgtgtgaactgctccttcttg | tccttcttg | GGGGACTAAAAC | | |
| | | | (SEQ ID. NO: 1125) | (SEQ ID. | (SEQ ID. | | |
| | | | | NO: | NO: 1127) | | |
| | | | | 1126) | | | |
| 1b | zika_57 | LwaCasl3a | GATTTAGACTACCCCAAAA | agcaagggc | GATTTAGACTAC | Zika | 1b |
| | | | ACGAAGGGGACTAAAACagc | cgtgtgaact | CCCAAAAACGAA | ssRNA | |
| | | | aagggccgtgtgaactgctccttct | gctccttct | GGGGACTAAAAC | | |
| | | | (SEQ ID. NO: 1128) | (SEQ ID. | (SEQ ID. | | |
| | | | | NO: | NO: 1130) | | |
| | | | | 1129) | | | |
| 1b | zika_58 | LwaCasl3a | GATTTAGACTACCCCAAAA | ccagcaagg | GATTTAGACTAC | Zika | 1b |
| | | | ACGAAGGGGACTAAAACcca | gccgtgtga | CCCAAAAACGAA | ssRNA | |
| | | | gcaagggccgtgtgaactgctcctt | actgctcctt | GGGGACTAAAAC | | |
| | | | (SEQ ID. NO: 1131) | (SEQ ID. | (SEQ ID. | | |
| | | | | NO: | NO: 1133) | | |
| | | | | 1132) | | | |
| 1b | zika_59 | LwaCasl3a | GATTTAGACTACCCCAAAA | ctccagcaa | GATTTAGACTAC | Zika | 1b |
| | | | ACGAAGGGGACTAAAACctc | gggccgtgt | CCCAAAAACGAA | ssRNA | |
| | | | cagcaagggccgtgtgaactgctcc | gaactgctcc | GGGGACTAAAAC | | |
| | | | (SEQ ID. NO: 1134) | (SEQ ID. | (SEQ ID. | | |
| | | | | NO: | NO: 1136) | | |
| | | | | 1135) | | | |
| 1b | zika_60 | LwaCasl3a | GATTTAGACTACCCCAAAA | agctccagc | GATTTAGACTAC | Zika | 1b |
| | | | ACGAAGGGGACTAAAACagc | aagggccgt | CCCAAAAACGAA | ssRNA | |
| | | | tccagcaagggccgtgtgaactgct | gtgaactgct | GGGGACTAAAAC | | |
| | | | (SEQ ID. NO: 1137) | (SEQ ID. | (SEQ ID. | | |
| | | | | NO: | NO: 1139) | | |
| | | | | 1138) | | | |
| 1b | zika_61 | LwaCasl3a | GATTTAGACTACCCCAAAA | agagctcca | GATTTAGACTAC | Zika | 1b |
| | | | ACGAAGGGGACTAAAACaga | gcaagggcc | CCCAAAAACGAA | ssRNA | |
| | | | gctccagcaagggccgtgtgaactg | gtgtgaactg | GGGGACTAAAAC | | |
| | | | (SEQ ID. NO: 1140) | (SEQ ID. | (SEQ ID. | | |
| | | | | NO: | NO: 1142) | | |
| | | | | 1141) | | | |
| 1b | zika_62 | LwaCasl3a | GATTTAGACTACCCCAAAA | ccagagctc | GATTTAGACTAC | Zika | 1b |
| | | | ACGAAGGGGACTAAAACcca | cagcaaggg | CCCAAAAACGAA | ssRNA | |
| | | | gagctccagcaagggccgtgtgaac | ccgtgtgaa | GGGGACTAAAAC | | |
| | | | (SEQ ID. NO: 1143) | c (SEQ | (SEQ ID. | | |
| | | | | ID. NO: | NO: 1145) | | |
| | | | | 1144) | | | |
| 1b | zika_63 | LwaCasl3a | GATTTAGACTACCCCAAAA | ctccagagct | GATTTAGACTAC | Zika | 1b |
| | | | ACGAAGGGGACTAAAACctc | ccagcaagg | CCCAAAAACGAA | ssRNA | |
| | | | cagagctccagcaagggccgtgtga | gccgtgtga | GGGGACTAAAAC | | |
| | | | (SEQ ID. NO: 1146) | (SEQ ID. | (SEQ ID. | | |
| | | | | NO: | NO: 1148) | | |
| | | | | 1147) | | | |
| 1b | zika_64 | LwaCas13a | GATTTAGACTACCCCAAAA | gcctccaga | GATTTAGACTAC | Zika | 1b |
| | | | ACGAAGGGGACTAAAACgcc | gctccagca | CCCAAAAACGAA | ssRNA | |
| | | | tccagagctccagcaagggccgtgt | agggccgtg | GGGGACTAAAAC | | |
| | | | (SEQ ID. NO: 1149) | t (SEQ | (SEQ ID. | | |
| | | | | ID. NO: | NO: 1151) | | |
| | | | | 1150) | | | |
| 1b | zika_65 | LwaCas13a | GATTTAGACTACCCCAAAA | cagcctcca | GATTTAGACTAC | Zika | 1b |
| | | | ACGAAGGGGACTAAAACcag | gagctccag | CCCAAAAACGAA | ssRNA | |
| | | | cctccagagctccagcaagggccgt | caagggccg | GGGGACTAAAAC | | |
| | | | (SEQ ID. NO: 1152) | t (SEQ | (SEQ ID. | | |
| | | | | ID. NO: | NO: 1154) | | |
| | | | | 1153) | | | |
| 1b | zika_66 | LwaCas13a | GATTTAGACTACCCCAAAA | ctcagcctcc | GATTTAGACTAC | Zika | 1b |
| | | | ACGAAGGGGACTAAAACctc | agagctcca | CCCAAAAACGAA | ssRNA | |
| | | | agcctccagagctccagcaagggcc | gcaagggcc | GGGGACTAAAAC | | |
| | | | (SEQ ID. NO: 1155) | (SEQ ID. | (SEQ ID. | | |
| | | | | NO: | NO: 1157) | | |
| | | | | 1156) | | | |
| 1b | zika_67 | LwaCas13a | GATTTAGACTACCCCAAAA | atctcagcct | GATTTAGACTAC | Zika | 1b |
| | | | ACGAAGGGGACTAAAACatc | ccagagctc | CCCAAAAACGAA | ssRNA | |
| | | | tcagcctccagagctccagcaaggg | cagcaaggg | GGGGACTAAAAC | | |
| | | | (SEQ ID. NO: 1158) | (SEQ ID. | (SEQ ID. | | |
| | | | | NO: | NO: 1160) | | |
| | | | | 1159) | | | |
| 1b | zika_68 | LwaCas13a | GATTTAGACTACCCCAAAA | catctcagcc | GATTTAGACTAC | Zika | 1b |
| | | | ACGAAGGGGACTAAAACcat | tccagagctc | CCCAAAAACGAA | ssRNA | |
| | | | ctcagcctccagagctccagcaagg | cagcaagg | GGGGACTAAAAC | | |
| | | | (SEQ ID. NO: 1161) | (SEQ ID. | (SEQ ID. | | |
| | | | | NO: | NO: 1163) | | |
| | | | | 1162) | | | |
| 1b | zika_69 | LwaCas13a | GATTTAGACTACCCCAAAA | ccatctcagc | GATTTAGACTAC | Zika | 1b |
| | | | ACGAAGGGGACTAAAACcca | ctccagagct | CCCAAAAACGAA | ssRNA | |
| | | | tctcagcctccagagctccagcaag | ccagcaag | GGGGACTAAAAC | | |
| | | | (SEQ ID. NO: 1164) | (SEQ ID. | (SEQ ID. | | |
| | | | | NO: | NO: 1166) | | |
| | | | | 1165) | | | |
| 1b | zika_70 | LwaCas13a | GATTTAGACTACCCCAAAA | tccatctcag | GATTTAGACTAC | Zika | 1b |
| | | | ACGAAGGGGACTAAAACtcc | cctccagag | CCCAAAAACGAA | ssRNA | |
| | | | atctcagcctccagagctccagcaa | ctccagcaa | GGGGACTAAAAC | | |
| | | | (SEQ ID. NO: 1167) | (SEQ ID. | (SEQ ID. | | |
| | | | | NO: | NO: 1169) | | |
| | | | | 1168) | | | |
| 1b | zika_71 | LwaCas13a | GATTTAGACTACCCCAAAA | atccatctca | GATTTAGACTAC | Zika | 1b |
| | | | ACGAAGGGGACTAAAACatc | gcctccaga | CCCAAAAACGAA | ssRNA | |
| | | | catctcagcctccagagctccagca | gctccagca | GGGGACTAAAAC | | |
| | | | (SEQ ID. NO: 1170) | (SEQ ID. | (SEQ ID. | | |
| | | | | NO: | NO: 1172) | | |
| | | | | 1171) | | | |
| 1b | zika_72 | LwaCas13a | GATTTAGACTACCCCAAAA | catccatctc | GATTTAGACTAC | Zika | 1b |
| | | | ACGAAGGGGACTAAAACcat | agcctccag | CCCAAAAACGAA | ssRNA | |
| | | | ccatctcagcctccagagctccagc | agctccagc | GGGGACTAAAAC | | |
| | | | (SEQ ID. NO: 1173) | (SEQ ID. | (SEQ ID. | | |
| | | | | NO: | NO: 1175) | | |
| | | | | 1174) | | | |
| 1b | zika_73 | LwaCas13a | GATTTAGACTACCCCAAAA | ccatccatct | GATTTAGACTAC | Zika | 1b |
| | | | ACGAAGGGGACTAAAACcca | cagcctcca | CCCAAAAACGAA | ssRNA | |
| | | | tccatctcagcctccagagctccag | gagctccag | GGGGACTAAAAC | | |
| | | | (SEQ ID. NO: 1176) | (SEQ ID. | (SEQ ID. | | |
| | | | | NO: | NO: 1178) | | |
| | | | | 1177) | | | |
| 1b | zika_74 | LwaCas13a | GATTTAGACTACCCCAAAA | accatccatc | GATTTAGACTAC | Zika | 1b |
| | | | ACGAAGGGGACTAAAACacc | tcagcctcca | CCCAAAAACGAA | ssRNA | |
| | | | atccatctcagcctccagagctcca | gagctcca | GGGGACTAAAAC | | |
| | | | (SEQ ID. NO: 1179) | (SEQ ID. | (SEQ ID. | | |
| | | | | NO: | NO: 1181) | | |
| | | | | 1180) | | | |
| 1b | zika_75 | LwaCas13a | GATTTAGACTACCCCAAAA | caccatccat | GATTTAGACTAC | Zika | 1b |
| | | | ACGAAGGGGACTAAAACcac | ctcagcctcc | CCCAAAAACGAA | ssRNA | |
| | | | catccatctcagcctccagagctcc | agagctcc | GGGGACTAAAAC | | |
| | | | (SEQ ID. NO: 1182) | (SEQ ID. | (SEQ ID. | | |
| | | | | NO: | NO: 1184) | | |
| | | | | 1183) | | | |
| 1b | zika_76 | LwaCas13a | GATTTAGACTACCCCAAAA | gcaccatcc | GATTTAGACTAC | Zika | 1b |
| | | | ACGAAGGGGACTAAAACgca | atctcagcct | CCCAAAAACGAA | ssRNA | |
| | | | ccatccatctcagcctccagagctc | ccagagctc | GGGGACTAAAAC | | |
| | | | (SEQ ID. NO: 1185) | (SEQ ID. | (SEQ ID. | | |
| | | | | NO: | NO: 1187) | | |
| | | | | 1186) | | | |
| 1b | zika_77 | LwaCas13a | GATTTAGACTACCCCAAAA | tgcaccatcc | GATTTAGACTAC | Zika | 1b |
| | | | ACGAAGGGGACTAAAACtgc | atctcagcct | CCCAAAAACGAA | ssRNA | |
| | | | accatccatctcagcctccagagct | ccagagct | GGGGACTAAAAC | | |
| | | | (SEQ ID. NO: 1188) | (SEQ ID. | (SEQ ID. | | |
| | | | | NO: | NO: 1190) | | |
| | | | | 1189) | | | |
| 1b | zika_78 | LwaCas13a | GATTTAGACTACCCCAAAA | ttgcaccatc | GATTTAGACTAC | Zika | 1b |
| | | | ACGAAGGGGACTAAAACttg | catctcagcc | CCCAAAAACGAA | ssRNA | |
| | | | caccatccatctcagcctccagagc | tccagagc | GGGGACTAAAAC | | |
| | | | (SEQ ID. NO: 1191) | (SEQ ID. | (SEQ ID. | | |
| | | | | NO: | NO: 1193) | | |
| | | | | 1192) | | | |
| 1b | zika_79 | LwaCas13a | GATTTAGACTACCCCAAAA | tttgcaccat | GATTTAGACTAC | Zika | 1b |
| | | | ACGAAGGGGACTAAAACttt | ccatctcagc | CCCAAAAACGAA | ssRNA | |
| | | | gcaccatccatctcagcctccagag | ctccagag | GGGGACTAAAAC | | |
| | | | (SEQ ID. NO: 1194) | (SEQ ID. | (SEQ ID. | | |
| | | | | NO: | NO: 1196) | | |
| | | | | 1195) | | | |
| 1b | zika_80 | LwaCas13a | GATTTAGACTACCCCAAAA | ctttgcacca | GATTTAGACTAC | Zika | 1b |
| | | | ACGAAGGGGACTAAAACctt | tccatctcag | CCCAAAAACGAA | ssRNA | |
| | | | tgcaccatccatctcagcctccaga | cctccaga | GGGGACTAAAAC | | |
| | | | (SEQ ID. NO: 1197) | (SEQ ID. | (SEQ ID. | | |
| | | | | NO: | NO: 1199) | | |
| | | | | 1198) | | | |
| 1b | zika_81 | LwaCas13a | GATTTAGACTACCCCAAAA | cctttgcacc | GATTTAGACTAC | Zika | 1b |
| | | | ACGAAGGGGACTAAAACcct | atccatctca | CCCAAAAACGAA | ssRNA | |
| | | | ttgcaccatccatctcagcctccag | gcctccag | GGGGACTAAAAC | | |
| | | | (SEQ ID. NO: 1200) | (SEQ ID. | (SEQ ID. | | |
| | | | | NO: | NO: 1202) | | |
| | | | | 1201) | | | |
| 1b | zika_82 | LwaCas13a | GATTTAGACTACCCCAAAA | ccctttgcac | GATTTAGACTAC | Zika | 1b |
| | | | ACGAAGGGGACTAAAACccc | catccatctc | CCCAAAAACGAA | ssRNA | |
| | | | tttgcaccatccatctcagcctcca | agcctcca | GGGGACTAAAAC | | |
| | | | (SEQ ID. NO: 1203) | (SEQ ID. | (SEQ ID. | | |
| | | | | NO: | NO: 1205) | | |
| | | | | 1204) | | | |
| 1b | zika_83 | LwaCas13a | GATTTAGACTACCCCAAAA | tccctttgca | GATTTAGACTAC | Zika | 1b |
| | | | ACGAAGGGGACTAAAACtcc | ccatccatct | CCCAAAAACGAA | ssRNA | |
| | | | ctttgcaccatccatctcagcctcc | cagcctcc | GGGGACTAAAAC | | |
| | | | (SEQ ID. NO: 1206) | (SEQ ID. | (SEQ ID. | | |
| | | | | NO: | NO: 1208) | | |
| | | | | 1207) | | | |
| 1b | zika_84 | LwaCas13a | GATTTAGACTACCCCAAAA | ttccctttgca | GATTTAGACTAC | Zika | 1b |
| | | | ACGAAGGGGACTAAAACttc | ccatccatct | CCCAAAAACGAA | ssRNA | |
| | | | cctttgcaccatccatctcagcctc | cagcctc | GGGGACTAAAAC | | |
| | | | (SEQ ID. NO: 1209) | (SEQ ID. | (SEQ ID. | | |
| | | | | NO: | NO: 1211) | | |
| | | | | 1210) | | | |
| 1b | zika_85 | LwaCas13a | GATTTAGACTACCCCAAAA | cttccctttgc | GATTTAGACTAC | Zika | 1b |
| | | | ACGAAGGGGACTAAAACctt | accatccatc | CCCAAAAACGAA | ssRNA | |
| | | | ccctttgcaccatccatctcagcct | tcagcct | GGGGACTAAAAC | | |
| | | | (SEQ ID. NO: 1212) | (SEQ ID. | (SEQ ID. | | |
| | | | | NO: | NO: 1214) | | |
| | | | | 1213) | | | |
| 1b | zika_86 | LwaCas13a | GATTTAGACTACCCCAAAA | ccttccctttg | GATTTAGACTAC | Zika | 1b |
| | | | ACGAAGGGGACTAAAACcct | caccatccat | CCCAAAAACGAA | ssRNA | |
| | | | tecctttgcaccatccatctcagcc | ctcagcc | GGGGACTAAAAC | | |
| | | | (SEQ ID. NO: 1215) | (SEQ ID. | (SEQ ID. | | |
| | | | | NO: | NO: 1217) | | |
| | | | | 1216) | | | |
| 1b | zika_87 | LwaCas13a | GATTTAGACTACCCCAAAA | gccttcccttt | GATTTAGACTAC | Zika | 1b |
| | | | ACGAAGGGGACTAAAACgcc | gcaccatcc | CCCAAAAACGAA | ssRNA | |
| | | | ttccctttgcaccatccatctcagc | atctcagc | GGGGACTAAAAC | | |
| | | | (SEQ ID. NO: 1218) | (SEQ ID. | (SEQ ID. | | |
| | | | | NO: | NO: 1220) | | |
| | | | | 1219) | | | |
| 1b | zika_88 | LwaCas13a | GATTTAGACTACCCCAAAA | agccttccct | GATTTAGACTAC | Zika | 1b |
| | | | ACGAAGGGGACTAAAACagc | ttgcaccatc | CCCAAAAACGAA | ssRNA | |
| | | | cttccctttgcaccatccatctcag | catctcag | GGGGACTAAAAC | | |
| | | | (SEQ ID. NO: 1221) | (SEQ ID. | (SEQ ID. | | |
| | | | | NO: | NO: 1223) | | |
| | | | | 1222) | | | |
| 1b | zika_89 | LwaCas13a | GATTTAGACTACCCCAAAA | cagccttccc | GATTTAGACTAC | Zika | 1b |
| | | | ACGAAGGGGACTAAAACcag | tttgcaccat | CCCAAAAACGAA | ssRNA | |
| | | | ccttccctttgcaccatccatctca | ccatctca | GGGGACTAAAAC | | |
| | | | (SEQ ID. NO: 1224) | (SEQ ID. | (SEQ ID. | | |
| | | | | NO: | NO: 1226) | | |
| | | | | 1225) | | | |
| 1b | zika_90 | LwaCas13a | GATTTAGACTACCCCAAAA | acagccttcc | GATTTAGACTAC | Zika | 1b |
| | | | ACGAAGGGGACTAAAACaca | ctttgcacca | CCCAAAAACGAA | ssRNA | |
| | | | gccttccctttgcaccatccatctc | tccatctc | GGGGACTAAAAC | | |
| | | | (SEQ ID. NO: 1227) | (SEQ ID. | (SEQ ID. | | |
| | | | | NO: | NO: 1229) | | |
| | | | | 1228) | | | |
| 1b | zika_91 | LwaCas13a | GATTTAGACTACCCCAAAA | gacagccttc | GATTTAGACTAC | Zika | 1b |
| | | | ACGAAGGGGACTAAAACgac | cctttgcacc | CCCAAAAACGAA | ssRNA | |
| | | | agccttccctttgcaccatccatct | atccatct | GGGGACTAAAAC | | |
| | | | (SEQ ID. NO: 1230) | (SEQ ID. | (SEQ ID. | | |
| | | | | NO: | NO: 1232) | | |
| | | | | 1231) | | | |
| 1b | zika_92 | LwaCas13a | GATTTAGACTACCCCAAAA | ggacagcct | GATTTAGACTAC | Zika | 1b |
| | | | ACGAAGGGGACTAAAACgga | tccctttgca | CCCAAAAACGAA | ssRNA | |
| | | | cagccttccctttgcaccatccatc | ccatccatc | GGGGACTAAAAC | | |
| | | | (SEQ ID. NO: 1233) | (SEQ ID. | (SEQ ID. | | |
| | | | | NO: | NO: 1235) | | |
| | | | | 1234) | | | |
| 1b | zika_93 | LwaCas13a | GATTTAGACTACCCCAAAA | aggacagcc | GATTTAGACTAC | Zika | 1b |
| | | | ACGAAGGGGACTAAAACagg | ttccctttgca | CCCAAAAACGAA | ssRNA | |
| | | | acagccttccctttgcaccatccat | ccatccat | GGGGACTAAAAC | | |
| | | | (SEQ ID. NO: 1236) | (SEQ ID. | (SEQ ID. | | |
| | | | | NO: | NO: 1238) | | |
| | | | | 1237) | | | |
| 1b | zika_94 | LwaCas13a | GATTTAGACTACCCCAAAA | gaggacagc | GATTTAGACTAC | Zika | 1b |
| | | | ACGAAGGGGACTAAAACgag | cttccctttgc | CCCAAAAACGAA | ssRNA | |
| | | | gacagccttccctttgcaccatcca | accatcca | GGGGACTAAAAC | | |
| | | | (SEQ ID. NO: 1239) | (SEQ ID. | (SEQ ID. | | |
| | | | | NO: | NO: 1241) | | |
| | | | | 1240) | | | |
| 1b | zika_0 | CcaCas13b | tttgttgttccagtgtggagttccg | tttgttgttcc | GTTGGAACTGCT | Zika | 1b |
| | | | gtgtcGTTGGAACTGCTCTCATTTT | agtgtggagt | CTCATTTTGGAGG | ssRNA | |
| | | | GGAGGGTAATCACAAC | tccggtgtc | GTAATCACAAC | | |
| | | | (SEQ ID. NO: 1242) | (SEQ ID. | (SEQ ID. | | |
| | | | | NO: | NO: 1244) | | |
| | | | | 1243) | | | |
| 1b | zika_1 | CcaCas13b | ctttgttgttccagtgtggagttcc | ctttgttgttc | GTTGGAACTGCT | Zika | 1b |
| | | | ggtgtGTTGGAACTGCTCTCATTTT | cagtgtgga | CTCATTTTGGAGG | ssRNA | |
| | | | GGAGGGTAATCACAAC | gttccggtgt | GTAATCACAAC | | |
| | | | (SEQ ID. NO: 1245) | (SEQ ID. | (SEQ ID. | | |
| | | | | NO: | NO: 1247) | | |
| | | | | 1246) | | | |
| 1b | zika_2 | CcaCas13b | tctttgttgttccagtgtggagttc | tctttgttgtt | GTTGGAACTGCT | Zika | 1b |
| | | | cggtgGTTGGAACTGCTCTCATTTT | ccagtgtgga | CTCATTTTGGAGG | ssRNA | |
| | | | GGAGGGTAATCACAAC | gttccggtg | GTAATCACAAC | | |
| | | | (SEQ ID. NO: 1248) | (SEQ ID. | (SEQ ID. | | |
| | | | | NO: | NO: 1250) | | |
| | | | | 1249) | | | |
| 1b | zika_3 | CcaCas13b | ttctttgttgttccagtgtggagtt | ttctttgttgt | GTTGGAACTGCT | Zika | 1b |
| | | | ccggtGTTGGAACTGCTCTCATTTT | tccagtgtgg | CTCATTTTGGAGG | ssRNA | |
| | | | GGAGGGTAATCACAAC | agttccggt | GTAATCACAAC | | |
| | | | (SEQ ID. NO: 1251) | (SEQ ID. | (SEQ ID. | | |
| | | | | NO: | NO: 1253) | | |
| | | | | 1252) | | | |
| 1b | zika_4 | CcaCas13b | cttctttgttgttccagtgtggagt | cttctttgttg | GTTGGAACTGCT | Zika | 1b |
| | | | tccggGTTGGAACTGCTCTCATTTT | ttccagtgtgg | CTCATTTTGGAGG | ssRNA | |
| | | | GGAGGGTAATCACAAC | agttccgg | GTAATCACAAC | | |
| | | | (SEQ ID. NO: 1254) | (SEQ ID. | (SEQ ID. | | |
| | | | | NO: | NO: 1256) | | |
| | | | | 1255) | | | |
| 1b | zika_5 | CcaCas13b | gcttctttgttgttccagtgtggag | gcttctttgtt | GTTGGAACTGCT | Zika | 1b |
| | | | ttccgGTTGGAACTGCTCTCATTTT | gttccagtgt | CTCATTTTGGAGG | ssRNA | |
| | | | GGAGGGTAATCACAAC | ggagttccg | GTAATCACAAC | | |
| | | | (SEQ ID. NO: 1257) | (SEQ ID. | (SEQ ID. | | |
| | | | | NO: | NO: 1259) | | |
| | | | | 1258) | | | |
| 1b | zika_6 | CcaCas13b | tgcttctttgttgttccagtgtgga | tgcttctttgt | GTTGGAACTGCT | Zika | 1b |
| | | | gttccGTTGGAACTGCTCTCATTTT | tgttccagtgt | CTCATTTTGGAGG | ssRNA | |
| | | | GGAGGGTAATCACAAC | ggagttcc | GTAATCACAAC | | |
| | | | (SEQ ID. NO: 1260) | (SEQ ID. | (SEQ ID. | | |
| | | | | NO: | NO: 1262) | | |
| | | | | 1261) | | | |
| 1b | zika_7 | CcaCas13b | gtgcttctttgttgttccagtgtgg | gtgcttctttg | GTTGGAACTGCT | Zika | 1b |
| | | | agttcGTTGGAACTGCTCTCATTTT | ttgttccagtg | CTCATTTTGGAGG | ssRNA | |
| | | | GGAGGGTAATCACAAC | tggagttc | GTAATCACAAC | | |
| | | | (SEQ ID. NO: 1263) | (SEQ ID. | (SEQ ID. | | |
| | | | | NO: | NO: 1265) | | |
| | | | | 1264) | | | |
| 1b | zika_8 | CcaCas13b | agtgcttctttgttgttccagtgtg | agtgcttcttt | GTTGGAACTGCT | Zika | 1b |
| | | | gagttGTTGGAACTGCTCTCATTTT | gttgttccagt | CTCATTTTGGAGG | ssRNA | |
| | | | GGAGGGTAATCACAAC | gtggagtt | GTAATCACAAC | | |
| | | | (SEQ ID. NO: 1266) | (SEQ ID. | (SEQ ID. | | |
| | | | | NO: | NO: 1268) | | |
| | | | | 1267) | | | |
| 1b | zika_9 | CcaCas13b | cagtgcttctttgttgttccagtgt | cagtgcttctt | GTTGGAACTGCT | Zika | 1b |
| | | | ggagtGTTGGAACTGCTCTCATTTT | tgttgttccag | CTCATTTTGGAGG | ssRNA | |
| | | | GGAGGGTAATCACAAC | tgtggagt | GTAATCACAAC | | |
| | | | (SEQ ID. NO: 1269) | (SEQ ID. | (SEQ ID. | | |
| | | | | NO: | NO: 1271) | | |
| | | | | 1270) | | | |
| 1b | zika_10 | CcaCas13b | ccagtgcttctttgttgttccagtg | ccagtgcttc | GTTGGAACTGCT | Zika | 1b |
| | | | tggagGTTGGAACTGCTCTCATTTT | tttgttgttcc | CTCATTTTGGAGG | ssRNA | |
| | | | GGAGGGTAATCACAAC | agtgtggag | GTAATCACAAC | | |
| | | | (SEQ ID. NO: 1272) | (SEQ ID. | (SEQ ID. | | |
| | | | | NO: | NO: 1274) | | |
| | | | | 1273) | | | |
| 1b | zika_11 | CcaCas13b | accagtgcttctttgttgttccagt | accagtgctt | GTTGGAACTGCT | Zika | 1b |
| | | | gtggaGTTGGAACTGCTCTCATTTT | ctttgttgttc | CTCATTTTGGAGG | ssRNA | |
| | | | GGAGGGTAATCACAAC | cagtgtgga | GTAATCACAAC | | |
| | | | (SEQ ID. NO: 1275) | (SEQ ID. | (SEQ ID. | | |
| | | | | NO: | NO: 1277) | | |
| | | | | 1276) | | | |
| 1b | zika_12 | CcaCas13b | taccagtgcttctttgttgttccag | taccagtgct | GTTGGAACTGCT | Zika | 1b |
| | | | tgtggGTTGGAACTGCTCTCATTTT | tctttgttgtt | CTCATTTTGGAGG | ssRNA | |
| | | | GGAGGGTAATCACAAC | ccagtgtgg | GTAATCACAAC | | |
| | | | (SEQ ID. NO: 1278) | (SEQ ID. | (SEQ ID. | | |
| | | | | NO: | NO: 1280) | | |
| | | | | 1279) | | | |
| 1b | zika_13 | CcaCas13b | ctaccagtgcttctttgttgttcca | ctaccagtgc | GTTGGAACTGCT | Zika | 1b |
| | | | gtgtgGTTGGAACTGCTCTCATTTT | ttctttgttgt | CTCATTTTGGAGG | ssRNA | |
| | | | GGAGGGTAATCACAAC | tccagtgtg | GTAATCACAAC | | |
| | | | (SEQ ID. NO: 1281) | (SEQ ID. | (SEQ ID. | | |
| | | | | NO: | NO: 1283) | | |
| | | | | 1282) | | | |
| 1b | zika_14 | CcaCas13b | tctaccagtgcttctttgttgttcc | tctaccagtg | GTTGGAACTGCT | Zika | 1b |
| | | | agtgtGTTGGAACTGCTCTCATTTT | cttctttgttg | CTCATTTTGGAGG | ssRNA | |
| | | | GGAGGGTAATCACAAC | ttccagtgt | GTAATCACAAC | | |
| | | | (SEQ ID. NO: 1284) | (SEQ ID. | (SEQ ID. | | |
| | | | | NO: | NO: 1286) | | |
| | | | | 1285) | | | |
| 1b | zika_15 | CcaCas13b | ctctaccagtgcttctttgttgttc | ctctaccagt | GTTGGAACTGCT | Zika | 1b |
| | | | cagtgGTTGGAACTGCTCTCATTTT | gcttctttgtt | CTCATTTTGGAGG | ssRNA | |
| | | | GGAGGGTAATCACAAC | gttccagtg | GTAATCACAAC | | |
| | | | (SEQ ID. NO: 1287) | (SEQ ID. | (SEQ ID. | | |
| | | | | NO: | NO: 1289) | | |
| | | | | 1288) | | | |
| 1b | zika_16 | CcaCas13b | actctaccagtgcttctttgttgtt | actctaccag | GTTGGAACTGCT | Zika | 1b |
| | | | ccagtGTTGGAACTGCTCTCATTTT | tgcttctttgt | CTCATTTTGGAGG | ssRNA | |
| | | | GGAGGGTAATCACAAC | tgttccagt | GTAATCACAAC | | |
| | | | (SEQ ID. NO: 1290) | (SEQ ID. | (SEQ ID. | | |
| | | | | NO: | NO: 1292) | | |
| | | | | 1291) | | | |
| 1b | zika_17 | CcaCas13b | aactctaccagtgcttctttgttgt | aactctacca | GTTGGAACTGCT | Zika | 1b |
| | | | tccagGTTGGAACTGCTCTCATTTT | gtgcttctttg | CTCATTTTGGAGG | ssRNA | |
| | | | GGAGGGTAATCACAAC | ttgttccag | GTAATCACAAC | | |
| | | | (SEQ ID. NO: 1293) | (SEQ ID. | (SEQ ID. | | |
| | | | | NO: | NO: 1295) | | |
| | | | | 1294) | | | |
| 1b | zika_18 | CcaCas13b | gaactctaccagtgcttctttgttg | gaactctacc | GTTGGAACTGCT | Zika | 1b |
| | | | ttccaGTTGGAACTGCTCTCATTTT | agtgcttcttt | CTCATTTTGGAGG | ssRNA | |
| | | | GGAGGGTAATCACAAC | gttgttcca | GTAATCACAAC | | |
| | | | (SEQ ID. NO: 1296) | (SEQ ID. | (SEQ ID. | | |
| | | | | NO: | NO: 1298) | | |
| | | | | 1297) | | | |
| 1b | zika_19 | CcaCas13b | tgaactctaccagtgcttctttgtt | tgaactctac | GTTGGAACTGCT | Zika | 1b |
| | | | gttccGTTGGAACTGCTCTCATTTT | cagtgcttctt | CTCATTTTGGAGG | ssRNA | |
| | | | GGAGGGTAATCACAAC | tgttgttcc | GTAATCACAAC | | |
| | | | (SEQ ID. NO: 1299) | (SEQ ID. | (SEQ ID. | | |
| | | | | NO: | NO: 1301) | | |
| | | | | 1300) | | | |
| 1b | zika_20 | CcaCas13b | cttgaactctaccagtgcttctttg | cttgaactct | GTTGGAACTGCT | Zika | 1b |
| | | | ttgttGTTGGAACTGCTCTCATTTT | accagtgctt | CTCATTTTGGAGG | ssRNA | |
| | | | GGAGGGTAATCACAAC | ctttgttgtt | GTAATCACAAC | | |
| | | | (SEQ ID. NO: 1302) | (SEQ ID. | (SEQ ID. | | |
| | | | | NO: | NO: 1304) | | |
| | | | | 1303) | | | |
| 1b | zika_21 | CcaCas13b | tccttgaactctaccagtgcttctt | tccttgaact | GTTGGAACTGCT | Zika | 1b |
| | | | tgttgGTTGGAACTGCTCTCATTTT | ctaccagtgc | CTCATTTTGGAGG | ssRNA | |
| | | | GGAGGGTAATCACAAC | ttetttgttg | GTAATCACAAC | | |
| | | | (SEQ ID. NO: 1305) | (SEQ ID. | (SEQ ID. | | |
| | | | | NO: | NO: 1307) | | |
| | | | | 1306) | | | |
| 1b | zika_22 | CcaCas13b | cgtccttgaactctaccagtgcttc | cgtccttgaa | GTTGGAACTGCT | Zika | 1b |
| | | | tttgtGTTGGAACTGCTCTCATTTT | ctctaccagt | CTCATTTTGGAGG | ssRNA | |
| | | | GGAGGGTAATCACAAC | gcttctttgt | GTAATCACAAC | | |
| | | | (SEQ ID. NO: 1308) | (SEQ ID. | (SEQ ID. | | |
| | | | | NO: | NO: 1310) | | |
| | | | | 1309) | | | |
| 1b | zika_23 | CcaCas13b | tgcgtccttgaactctaccagtgct | tgcgtccttg | GTTGGAACTGCT | Zika | 1b |
| | | | tctttGTTGGAACTGCTCTCATTTT | aactctacca | CTCATTTTGGAGG | ssRNA | |
| | | | GGAGGGTAATCACAAC | gtgcttcttt | GTAATCACAAC | | |
| | | | (SEQ ID. NO: 1311) | (SEQ ID. | (SEQ ID. | | |
| | | | | NO: | NO: 1313) | | |
| | | | | 1312) | | | |
| 1b | zika_24 | CcaCas13b | tgtgcgtccttgaactctaccagtg | tgtgcgtcctt | GTTGGAACTGCT | Zika | 1b |
| | | | cttctGTTGGAACTGCTCTCATTTT | gaactctacc | CTCATTTTGGAGG | ssRNA | |
| | | | GGAGGGTAATCACAAC | agtgcttct | GTAATCACAAC | | |
| | | | (SEQ ID. NO: 1314) | (SEQ ID. | (SEQ ID. | | |
| | | | | NO: | NO: 1316) | | |
| | | | | 1315) | | | |
| 1b | zika_25 | CcaCas13b | catgtgcgtccttgaactctaccag | catgtgcgtc | GTTGGAACTGCT | Zika | 1b |
| | | | tgcttGTTGGAACTGCTCTCATTTT | cttgaactct | CTCATTTTGGAGG | ssRNA | |
| | | | GGAGGGTAATCACAAC | accagtgctt | GTAATCACAAC | | |
| | | | (SEQ ID. NO: 1317) | (SEQ ID. | (SEQ ID. | | |
| | | | | NO: | NO: 1319) | | |
| | | | | 1318) | | | |
| 1b | zika_26 | CcaCas13b | ggcatgtgcgtccttgaactctacc | ggcatgtgc | GTTGGAACTGCT | Zika | 1b |
| | | | agtgcGTTGGAACTGCTCTCATTTT | gtccttgaac | CTCATTTTGGAGG | ssRNA | |
| | | | GGAGGGTAATCACAAC | tctaccagtg | GTAATCACAAC | | |
| | | | (SEQ ID. NO: 1320) | c (SEQ | (SEQ ID. | | |
| | | | | ID. NO: | NO: 1322) | | |
| | | | | 1321) | | | |
| 1b | zika_27 | CcaCas13b | ttggcatgtgcgtccttgaactcta | ttggcatgtg | GTTGGAACTGCT | Zika | 1b |
| | | | ccagtGTTGGAACTGCTCTCATTTT | cgtccttgaa | CTCATTTTGGAGG | ssRNA | |
| | | | GGAGGGTAATCACAAC | ctctaccagt | GTAATCACAAC | | |
| | | | (SEQ ID. NO: 1323) | (SEQ ID. | (SEQ ID. | | |
| | | | | NO: | NO: 1325) | | |
| | | | | 1324) | | | |
| 1b | zika_28 | CcaCas13b | ttttggcatgtgcgtccttgaactc | ttttggcatgt | GTTGGAACTGCT | Zika | 1b |
| | | | taccaGTTGGAACTGCTCTCATTTT | gcgtccttga | CTCATTTTGGAGG | ssRNA | |
| | | | GGAGGGTAATCACAAC | actctacca | GTAATCACAAC | | |
| | | | (SEQ ID. NO: 1326) | (SEQ ID. | (SEQ ID. | | |
| | | | | NO: | NO: 1328) | | |
| | | | | 1327) | | | |
| 1b | zika_29 | CcaCas13b | ccttttggcatgtgcgtccttgaac | ccttttggcat | GTTGGAACTGCT | Zika | 1b |
| | | | tctacGTTGGAACTGCTCTCATTTT | gtgcgtcctt | CTCATTTTGGAGG | ssRNA | |
| | | | GGAGGGTAATCACAAC | gaactctac | GTAATCACAAC | | |
| | | | (SEQ ID. NO: 1329) | (SEQ ID. | (SEQ ID. | | |
| | | | | NO: | NO: 1331) | | |
| | | | | 1330) | | | |
| 1b | zika_30 | CcaCas13b | tgccttttggcatgtgcgtccttga | tgccttttggc | GTTGGAACTGCT | Zika | 1b |
| | | | actctGTTGGAACTGCTCTCATTTT | atgtgcgtcc | CTCATTTTGGAGG | ssRNA | |
| | | | GGAGGGTAATCACAAC | ttgaactct | GTAATCACAAC | | |
| | | | (SEQ ID. NO: 1332) | (SEQ ID. | (SEQ ID. | | |
| | | | | NO: | NO: 1334) | | |
| | | | | 1333) | | | |
| 1b | zika_31 | CcaCas13b | tttgccttttggcatgtgcgtcctt | tttgccttttg | GTTGGAACTGCT | Zika | 1b |
| | | | gaactGTTGGAACTGCTCTCATTTT | gcatgtgcgt | CTCATTTTGGAGG | ssRNA | |
| | | | GGAGGGTAATCACAAC | ccttgaact | GTAATCACAAC | | |
| | | | (SEQ ID. NO: 1335) | (SEQ ID. | (SEQ ID. | | |
| | | | | NO: | NO: 1337) | | |
| | | | | 1336) | | | |
| 1b | zika_32 | CcaCas13b | agtttgccttttggcatgtgcgtcc | agtttgccttt | GTTGGAACTGCT | Zika | 1b |
| | | | ttgaaGTTGGAACTGCTCTCATTTT | tggcatgtgc | CTCATTTTGGAGG | ssRNA | |
| | | | GGAGGGTAATCACAAC | gtccttgaa | GTAATCACAAC | | |
| | | | (SEQ ID. NO: 1338) | (SEQ ID. | (SEQ ID. | | |
| | | | | NO: | NO: 1340) | | |
| | | | | 1339) | | | |
| 1b | zika_33 | CcaCas13b | acagtttgccttttggcatgtgcgt | acagtttgcc | GTTGGAACTGCT | Zika | 1b |
| | | | ccttgGTTGGAACTGCTCTCATTTT | ttttggcatgt | CTCATTTTGGAGG | ssRNA | |
| | | | GGAGGGTAATCACAAC | gcgtccttg | GTAATCACAAC | | |
| | | | (SEQ ID. NO: 1341) | (SEQ ID. | (SEQ ID. | | |
| | | | | NO: | NO: 1343) | | |
| | | | | 1342) | | | |
| 1b | zika_34 | CcaCas13b | cgacagtttgccttttggcatgtgc | cgacagtttg | GTTGGAACTGCT | Zika | 1b |
| | | | gtcctGTTGGAACTGCTCTCATTTT | ccttttggcat | CTCATTTTGGAGG | ssRNA | |
| | | | GGAGGGTAATCACAAC | gtgcgtcct | GTAATCACAAC | | |
| | | | (SEQ ID. NO: 1344) | (SEQ ID. | (SEQ ID. | | |
| | | | | NO: | NO: 1346) | | |
| | | | | 1345) | | | |
| 1b | zika_35 | CcaCas13b | cacgacagtttgccttttggcatgt | cacgacagtt | GTTGGAACTGCT | Zika | 1b |
| | | | gcgtcGTTGGAACTGCTCTCATTTT | tgccttttggc | CTCATTTTGGAGG | ssRNA | |
| | | | GGAGGGTAATCACAAC | atgtgcgtc | GTAATCACAAC | | |
| | | | (SEQ ID. NO: 1347) | (SEQ ID. | (SEQ ID. | | |
| | | | | NO: | NO: 1349) | | |
| | | | | 1348) | | | |
| 1b | zika_36 | CcaCas13b | accacgacagtttgccttttggcat | accacgaca | GTTGGAACTGCT | Zika | 1b |
| | | | gtgcgGTTGGAACTGCTCTCATTTT | gtttgcctttt | CTCATTTTGGAGG | ssRNA | |
| | | | GGAGGGTAATCACAAC | ggcatgtgc | GTAATCACAAC | | |
| | | | (SEQ ID. NO: 1350) | g (SEQ | (SEQ ID. | | |
| | | | | ID. NO: | NO: 1352) | | |
| | | | | 1351) | | | |
| 1b | zika_37 | CcaCas13b | gaaccacgacagtttgccttttggc | gaaccacga | GTTGGAACTGCT | Zika | 1b |
| | | | atgtgGTTGGAACTGCTCTCATTTT | cagtttgcctt | CTCATTTTGGAGG | ssRNA | |
| | | | GGAGGGTAATCACAAC | ttggcatgtg | GTAATCACAAC | | |
| | | | (SEQ ID. NO: 1353) | (SEQ ID. | (SEQ ID. | | |
| | | | | NO: | NO: 1355) | | |
| | | | | 1354) | | | |
| 1b | zika_38 | CcaCas13b | tagaaccacgacagtttgccttttg | tagaaccac | GTTGGAACTGCT | Zika | 1b |
| | | | gcatgGTTGGAACTGCTCTCATTTT | gacagtttgc | CTCATTTTGGAGG | ssRNA | |
| | | | GGAGGGTAATCACAAC | cttttggcatg | GTAATCACAAC | | |
| | | | (SEQ ID. NO: 1356) | (SEQ ID. | (SEQ ID. | | |
| | | | | NO: | NO: 1358) | | |
| | | | | 1357) | | | |
| 1b | zika_39 | CcaCas13b | cctagaaccacgacagtttgccttt | cctagaacc | GTTGGAACTGCT | Zika | 1b |
| | | | tggcaGTTGGAACTGCTCTCATTTT | acgacagttt | CTCATTTTGGAGG | ssRNA | |
| | | | GGAGGGTAATCACAAC | gccttttggc | GTAATCACAAC | | |
| | | | (SEQ ID. NO: 1359) | a (SEQ | (SEQ ID. | | |
| | | | | ID. NO: | NO: 1361) | | |
| | | | | 1360) | | | |
| 1b | zika_40 | CcaCas13b | tccctagaaccacgacagtttgcct | tccctagaac | GTTGGAACTGCT | Zika | 1b |
| | | | tttggGTTGGAACTGCTCTCATTTT | cacgacagtt | CTCATTTTGGAGG | ssRNA | |
| | | | GGAGGGTAATCACAAC | tgccttttgg | GTAATCACAAC | | |
| | | | (SEQ ID. NO: 1362) | (SEQ ID. | (SEQ ID. | | |
| | | | | NO: | NO: 1364) | | |
| | | | | 1363) | | | |
| 1b | zika_41 | CcaCas13b | actccctagaaccacgacagtttgc | actccctaga | GTTGGAACTGCT | Zika | 1b |
| | | | cttttGTTGGAACTGCTCTCATTTT | accacgaca | CTCATTTTGGAGG | ssRNA | |
| | | | GGAGGGTAATCACAAC | gtttgcctttt | GTAATCACAAC | | |
| | | | (SEQ ID. NO: 1365) | (SEQ ID. | (SEQ ID. | | |
| | | | | NO: | NO: 1367) | | |
| | | | | 1366) | | | |
| 1b | zika_42 | CcaCas13b | tgactccctagaaccacgacagttt | tgactcccta | GTTGGAACTGCT | Zika | 1b |
| | | | gccttGTTGGAACTGCTCTCATTTT | gaaccacga | CTCATTTTGGAGG | ssRNA | |
| | | | GGAGGGTAATCACAAC | cagtttgcctt | GTAATCACAAC | | |
| | | | (SEQ ID. NO: 1368) | (SEQ ID. | (SEQ ID. | | |
| | | | | NO: | NO: 1370) | | |
| | | | | 1369) | | | |
| 1b | zika_43 | CcaCas13b | cttgactccctagaaccacgacagt | cttgactccc | GTTGGAACTGCT | Zika | 1b |
| | | | ttgccGTTGGAACTGCTCTCATTTT | tagaaccac | CTCATTTTGGAGG | ssRNA | |
| | | | GGAGGGTAATCACAAC | gacagtttgc | GTAATCACAAC | | |
| | | | (SEQ ID. NO: 1371) | c (SEQ | (SEQ ID. | | |
| | | | | ID. NO: | NO: 1373) | | |
| | | | | 1372) | | | |
| 1b | zika_44 | CcaCas13b | ttcttgactccctagaaccacgaca | ttcttgactcc | GTTGGAACTGCT | Zika | 1b |
| | | | gtttgGTTGGAACTGCTCTCATTTT | ctagaacca | CTCATTTTGGAGG | ssRNA | |
| | | | GGAGGGTAATCACAAC | cgacagtttg | GTAATCACAAC | | |
| | | | (SEQ ID. NO: 1374) | (SEQ ID. | (SEQ ID. | | |
| | | | | NO: | NO: 1376) | | |
| | | | | 1375) | | | |
| 1b | zika_45 | CcaCas13b | ccttcttgactccctagaaccacga | ccttcttgact | GTTGGAACTGCT | Zika | 1b |
| | | | cagttGTTGGAACTGCTCTCATTTT | ccctagaac | CTCATTTTGGAGG | ssRNA | |
| | | | GGAGGGTAATCACAAC | cacgacagtt | GTAATCACAAC | | |
| | | | (SEQ ID. NO: 1377) | (SEQ ID. | (SEQ ID. | | |
| | | | | NO: | NO: 1379) | | |
| | | | | 1378) | | | |
| 1b | zika_46 | CcaCas13b | ctccttcttgactccctagaaccac | ctccttcttga | GTTGGAACTGCT | Zika | 1b |
| | | | gacagGTTGGAACTGCTCTCATTTT | ctccctagaa | CTCATTTTGGAGG | ssRNA | |
| | | | GGAGGGTAATCACAAC | ccacgacag | GTAATCACAAC | | |
| | | | (SEQ ID. NO: 1380) | (SEQ ID. | (SEQ ID. | | |
| | | | | NO: | NO: 1382) | | |
| | | | | 1381) | | | |
| 1b | zika_47 | CcaCas13b | tgctccttcttgactccctagaacc | tgctccttctt | GTTGGAACTGCT | Zika | 1b |
| | | | acgacGTTGGAACTGCTCTCATTTT | gactccctag | CTCATTTTGGAGG | ssRNA | |
| | | | GGAGGGTAATCACAAC | aaccacgac | GTAATCACAAC | | |
| | | | (SEQ ID. NO: 1383) | (SEQ ID. | (SEQ ID. | | |
| | | | | NO: | NO: 1385) | | |
| | | | | 1384) | | | |
| 1b | zika_48 | CcaCas13b | actgctccttcttgactccctagaa | actgctcctt | GTTGGAACTGCT | Zika | 1b |
| | | | ccacgGTTGGAACTGCTCTCATTTT | cttgactccc | CTCATTTTGGAGG | ssRNA | |
| | | | GGAGGGTAATCACAAC | tagaaccac | GTAATCACAAC | | |
| | | | (SEQ ID. NO: 1386) | g (SEQ | (SEQ ID. | | |
| | | | | ID. NO: | NO: 1388) | | |
| | | | | 1387) | | | |
| 1b | zika_49 | CcaCas13b | gaactgctccttcttgactccctag | gaactgctcc | GTTGGAACTGCT | Zika | 1b |
| | | | aaccaGTTGGAACTGCTCTCATTTT | ttcttgactcc | CTCATTTTGGAGG | ssRNA | |
| | | | GGAGGGTAATCACAAC | ctagaacca | GTAATCACAAC | | |
| | | | (SEQ ID. NO: 1389) | (SEQ ID. | (SEQ ID. | | |
| | | | | NO: | NO: 1391) | | |
| | | | | 1390) | | | |
| 1b | zika_50 | CcaCas13b | gtgaactgctccttcttgactccct | gtgaactgct | GTTGGAACTGCT | Zika | 1b |
| | | | agaacGTTGGAACTGCTCTCATTTT | ccttcttgact | CTCATTTTGGAGG | ssRNA | |
| | | | GGAGGGTAATCACAAC | ccctagaac | GTAATCACAAC | | |
| | | | (SEQ ID. NO: 1392) | (SEQ ID. | (SEQ ID. | | |
| | | | | NO: | NO: 1394) | | |
| | | | | 1393) | | | |
| 1b | zika_51 | CcaCas13b | gtgtgaactgctccttcttgactcc | gtgtgaactg | GTTGGAACTGCT | Zika | 1b |
| | | | ctagaGTTGGAACTGCTCTCATTTT | ctccttcttga | CTCATTTTGGAGG | ssRNA | |
| | | | GGAGGGTAATCACAAC | ctccctaga | GTAATCACAAC | | |
| | | | (SEQ ID. NO: 1395) | (SEQ ID. | (SEQ ID. | | |
| | | | | NO: | NO: 1397) | | |
| | | | | 1396) | | | |
| 1b | zika_52 | CcaCas13b | ccgtgtgaactgctccttcttgact | ccgtgtgaa | GTTGGAACTGCT | Zika | 1b |
| | | | ccctaGTTGGAACTGCTCTCATTTT | ctgctccttct | CTCATTTTGGAGG | ssRNA | |
| | | | GGAGGGTAATCACAAC | tgactcccta | GTAATCACAAC | | |
| | | | (SEQ ID. NO: 1398) | (SEQ ID. | (SEQ ID. | | |
| | | | | NO: | NO: 1400) | | |
| | | | | 1399) | | | |
| 1b | zika_53 | CcaCas13b | ggccgtgtgaactgctccttcttga | ggccgtgtg | GTTGGAACTGCT | Zika | 1b |
| | | | ctcccGTTGGAACTGCTCTCATTTT | aactgctcct | CTCATTTTGGAGG | ssRNA | |
| | | | GGAGGGTAATCACAAC | tcttgactcc | GTAATCACAAC | | |
| | | | (SEQ ID. NO: 1401) | c (SEQ | (SEQ ID. | | |
| | | | | ID. NO: | NO: 1403) | | |
| | | | | 1402) | | | |
| 1b | zika_54 | CcaCas13b | agggccgtgtgaactgctccttctt | agggccgtg | GTTGGAACTGCT | Zika | 1b |
| | | | gactcGTTGGAACTGCTCTCATTTT | tgaactgctc | CTCATTTTGGAGG | ssRNA | |
| | | | GGAGGGTAATCACAAC | cttcttgactc | GTAATCACAAC | | |
| | | | (SEQ ID. NO: 1404) | (SEQ ID. | (SEQ ID. | | |
| | | | | NO: | NO: 1406) | | |
| | | | | 1405) | | | |
| 1b | zika_55 | CcaCas13b | caagggccgtgtgaactgctccttc | caagggccg | GTTGGAACTGCT | Zika | 1b |
| | | | ttgacGTTGGAACTGCTCTCATTTT | tgtgaactgc | CTCATTTTGGAGG | ssRNA | |
| | | | GGAGGGTAATCACAAC | tccttcttgac | GTAATCACAAC | | |
| | | | (SEQ ID. NO: 1407) | (SEQ ID. | (SEQ ID. | | |
| | | | | NO: | NO: 1409) | | |
| | | | | 1408) | | | |
| 1b | zika_56 | CcaCas13b | agcaagggccgtgtgaactgctcct | agcaagggc | GTTGGAACTGCT | Zika | 1b |
| | | | tcttgGTTGGAACTGCTCTCATTTT | cgtgtgaact | CTCATTTTGGAGG | ssRNA | |
| | | | GGAGGGTAATCACAAC | gctccttcttg | GTAATCACAAC | | |
| | | | (SEQ ID. NO: 1410) | (SEQ ID. | (SEQ ID. | | |
| | | | | NO: | NO: 1412) | | |
| | | | | 1411) | | | |
| 1b | zika_57 | CcaCas13b | ccagcaagggccgtgtgaactgctc | ccagcaagg | GTTGGAACTGCT | Zika | 1b |
| | | | cttctGTTGGAACTGCTCTCATTTT | gccgtgtga | CTCATTTTGGAGG | ssRNA | |
| | | | GGAGGGTAATCACAAC | actgctcctt | GTAATCACAAC | | |
| | | | (SEQ ID. NO: 1413) | ct (SEQ | (SEQ ID. | | |
| | | | | ID. NO: | NO: 1415) | | |
| | | | | 1414) | | | |
| 1b | zika_58 | CcaCas13b | ctccagcaagggccgtgtgaactgc | ctccagcaa | GTTGGAACTGCT | Zika | 1b |
| | | | tccttGTTGGAACTGCTCTCATTTT | gggccgtgt | CTCATTTTGGAGG | ssRNA | |
| | | | GGAGGGTAATCACAAC | gaactgctcc | GTAATCACAAC | | |
| | | | (SEQ ID. NO: 1416) | tt (SEQ | (SEQ ID. | | |
| | | | | ID. NO: | NO: 1418) | | |
| | | | | 1417) | | | |
| 1b | zika_59 | CcaCas13b | agctccagcaagggccgtgtgaact | agctccagc | GTTGGAACTGCT | Zika | 1b |
| | | | gctccGTTGGAACTGCTCTCATTTT | aagggccgt | CTCATTTTGGAGG | ssRNA | |
| | | | GGAGGGTAATCACAAC | gtgaactgct | GTAATCACAAC | | |
| | | | (SEQ ID. NO: 1419) | cc (SEQ | (SEQ ID. | | |
| | | | | ID. NO: | NO: 1421) | | |
| | | | | 1420) | | | |
| 1b | zika_60 | CcaCas13b | agagctccagcaagggccgtgtgaa | agagctcca | GTTGGAACTGCT | Zika | 1b |
| | | | ctgctGTTGGAACTGCTCTCATTTT | gcaagggcc | CTCATTTTGGAGG | ssRNA | |
| | | | GGAGGGTAATCACAAC | gtgtgaactg | GTAATCACAAC | | |
| | | | (SEQ ID. NO: 1422) | ct (SEQ | (SEQ ID. | | |
| | | | | ID. NO: | NO: 1424) | | |
| | | | | 1423) | | | |
| 1b | zika_61 | CcaCas13b | ccagagctccagcaagggccgtgtg | ccagagctc | GTTGGAACTGCT | Zika | 1b |
| | | | aactgGTTGGAACTGCTCTCATTTT | cagcaaggg | CTCATTTTGGAGG | ssRNA | |
| | | | GGAGGGTAATCACAAC | ccgtgtgaa | GTAATCACAAC | | |
| | | | (SEQ ID. NO: 1425) | ctg (SEQ | (SEQ ID. | | |
| | | | | ID. NO: | NO: 1427) | | |
| | | | | 1426) | | | |
| 1b | zika_62 | CcaCas13b | ctccagagctccagcaagggccgtg | ctccagagct | GTTGGAACTGCT | Zika | 1b |
| | | | tgaacGTTGGAACTGCTCTCATTTT | ccagcaagg | CTCATTTTGGAGG | ssRNA | |
| | | | GGAGGGTAATCACAAC | gccgtgtga | GTAATCACAAC | | |
| | | | (SEQ ID. NO: 1428) | ac (SEQ | (SEQ ID. | | |
| | | | | ID. NO: | NO: 1430) | | |
| | | | | 1429) | | | |
| 1b | zika_63 | CcaCas13b | gcctccagagctccagcaagggccg | gcctccaga | GTTGGAACTGCT | Zika | lb |
| | | | tgtgaGTTGGAACTGCTCTCATTTT | gctccagca | CTCATTTTGGAGG | ssRNA | |
| | | | GGAGGGTAATCACAAC | agggccgtg | GTAATCACAAC | | |
| | | | (SEQ ID. NO: 1431) | tga (SEQ | (SEQ ID. | | |
| | | | | ID. NO: | NO: 1433) | | |
| | | | | 1432) | | | |
| 1b | zika_64 | CcaCas13b | cagcctccagagctccagcaagggc | cagcctcca | GTTGGAACTGCT | Zika | 1b |
| | | | cgtgtGTTGGAACTGCTCTCATTTT | gagctccag | CTCATTTTGGAGG | ssRNA | |
| | | | GGAGGGTAATCACAAC | caagggccg | GTAATCACAAC | | |
| | | | (SEQ ID. NO: 1434) | tgt (SEQ | (SEQ ID. | | |
| | | | | ID. NO: | NO: 1436) | | |
| | | | | 1435) | | | |
| 1b | zika_65 | CcaCas13b | ctcagcctccagagctccagcaagg | ctcagcctcc | GTTGGAACTGCT | Zika | 1b |
| | | | gccgtGTTGGAACTGCTCTCATTTT | agagctcca | CTCATTTTGGAGG | ssRNA | |
| | | | GGAGGGTAATCACAAC | gcaagggcc | GTAATCACAAC | | |
| | | | (SEQ ID. NO: 1437) | gt (SEQ | (SEQ ID. | | |
| | | | | ID. NO: | NO: 1439) | | |
| | | | | 1438) | | | |
| 1b | zika_66 | CcaCas13b | atctcagcctccagagctccagcaa | atctcagcct | GTTGGAACTGCT | Zika | 1b |
| | | | gggccGTTGGAACTGCTCTCATTTT | ccagagctc | CTCATTTTGGAGG | ssRNA | |
| | | | GGAGGGTAATCACAAC | cagcaaggg | GTAATCACAAC | | |
| | | | (SEQ ID. NO: 1440) | cc (SEQ | (SEQ ID. | | |
| | | | | ID. NO: | NO: 1442) | | |
| | | | | 1441) | | | |
| 1b | zika_67 | CcaCas13b | ccatctcagcctccagagctccagc | ccatctcagc | GTTGGAACTGCT | Zika | 1b |
| | | | aagggGTTGGAACTGCTCTCATTTT | ctccagagct | CTCATTTTGGAGG | ssRNA | |
| | | | GGAGGGTAATCACAAC | ccagcaagg | GTAATCACAAC | | |
| | | | (SEQ ID. NO: 1443) | g (SEQ | (SEQ ID. | | |
| | | | | ID. NO: | NO: 1445) | | |
| | | | | 1444) | | | |
| 1b | zika_68 | CcaCas13b | tccatctcagcctccagagctccag | tccatctcag | GTTGGAACTGCT | Zika | 1b |
| | | | caaggGTTGGAACTGCTCTCATTTT | cctccagag | CTCATTTTGGAGG | ssRNA | |
| | | | GGAGGGTAATCACAAC | ctccagcaa | GTAATCACAAC | | |
| | | | (SEQ ID. NO: 1446) | gg (SEQ | (SEQ ID. | | |
| | | | | ID. NO: | NO: 1448) | | |
| | | | | 1447) | | | |
| 1b | zika_69 | CcaCas13b | atccatctcagcctccagagctcca | atccatctca | GTTGGAACTGCT | Zika | 1b |
| | | | gcaagGTTGGAACTGCTCTCATTTT | gcctccaga | CTCATTTTGGAGG | ssRNA | |
| | | | GGAGGGTAATCACAAC | gctccagca | GTAATCACAAC | | |
| | | | (SEQ ID. NO: 1449) | ag (SEQ | (SEQ ID. | | |
| | | | | ID. NO: | NO: 1451) | | |
| | | | | 1450) | | | |
| 1b | zika_70 | CcaCas13b | catccatctcagcctccagagctcc | catccatctc | GTTGGAACTGCT | Zika | 1b |
| | | | agcaaGTTGGAACTGCTCTCATTTT | agcctccag | CTCATTTTGGAGG | ssRNA | |
| | | | GGAGGGTAATCACAAC | agctccagc | GTAATCACAAC | | |
| | | | (SEQ ID. NO: 1452) | aa (SEQ | (SEQ ID. | | |
| | | | | ID. NO: | NO: 1454) | | |
| | | | | 1453) | | | |
| 1b | zika_71 | CcaCas13b | ccatccatctcagcctccagagctc | ccatccatct | GTTGGAACTGCT | Zika | 1b |
| | | | cagcaGTTGGAACTGCTCTCATTTT | cagcctcca | CTCATTTTGGAGG | ssRNA | |
| | | | GGAGGGTAATCACAAC | gagctccag | GTAATCACAAC | | |
| | | | (SEQ ID. NO: 1455) | ca (SEQ | (SEQ ID. | | |
| | | | | ID. NO: | NO: 1457) | | |
| | | | | 1456) | | | |
| 1b | zika_72 | CcaCas13b | accatccatctcagcctccagagct | accatccatc | GTTGGAACTGCT | Zika | 1b |
| | | | ccagcGTTGGAACTGCTCTCATTTT | tcagcctcca | CTCATTTTGGAGG | ssRNA | |
| | | | GGAGGGTAATCACAAC | gagctccag | GTAATCACAAC | | |
| | | | (SEQ ID. NO: 1458) | c (SEQ | (SEQ ID. | | |
| | | | | ID. NO: | NO: 1460) | | |
| | | | | 1459) | | | |
| 1b | zika_73 | CcaCas13b | caccatccatctcagcctccagagc | caccatccat | GTTGGAACTGCT | Zika | 1b |
| | | | tccagGTTGGAACTGCTCTCATTTT | ctcagcctcc | CTCATTTTGGAGG | ssRNA | |
| | | | GGAGGGTAATCACAAC | agagctcca | GTAATCACAAC | | |
| | | | (SEQ ID. NO: 1461) | g (SEQ | (SEQ ID. | | |
| | | | | ID. NO: | NO: 1463) | | |
| | | | | 1462) | | | |
| 1b | zika_74 | CcaCas13b | gcaccatccatctcagcctccagag | gcaccatcc | GTTGGAACTGCT | Zika | 1b |
| | | | ctccaGTTGGAACTGCTCTCATTTT | atctcagcct | CTCATTTTGGAGG | ssRNA | |
| | | | GGAGGGTAATCACAAC | ccagagctc | GTAATCACAAC | | |
| | | | (SEQ ID. NO: 1464) | ca (SEQ | (SEQ ID. | | |
| | | | | ID. NO: | NO: 1466) | | |
| | | | | 1465) | | | |
| 1b | zika_75 | CcaCas13b | tgcaccatccatctcagcctccaga | tgcaccatcc | GTTGGAACTGCT | Zika | 1b |
| | | | gctccGTTGGAACTGCTCTCATTTT | atctcagcct | CTCATTTTGGAGG | ssRNA | |
| | | | GGAGGGTAATCACAAC | ccagagctc | GTAATCACAAC | | |
| | | | (SEQ ID. NO: 1467) | c (SEQ | (SEQ ID. | | |
| | | | | ID. NO: | NO: 1469) | | |
| | | | | 1468) | | | |
| 1b | zika_76 | CcaCas13b | ttgcaccatccatctcagcctccag | ttgcaccatc | GTTGGAACTGCT | Zika | 1b |
| | | | agctcGTTGGAACTGCTCTCATTTT | catctcagcc | CTCATTTTGGAGG | ssRNA | |
| | | | GGAGGGTAATCACAAC | tccagagctc | GTAATCACAAC | | |
| | | | (SEQ ID. NO: 1470) | (SEQ ID. | (SEQ ID. | | |
| | | | | NO: | NO: 1472) | | |
| | | | | 1471) | | | |
| 1b | zika_77 | CcaCas13b | tttgcaccatccatctcagcctcca | tttgcaccat | GTTGGAACTGCT | Zika | 1b |
| | | | gagctGTTGGAACTGCTCTCATTTT | ccatctcagc | CTCATTTTGGAGG | ssRNA | |
| | | | GGAGGGTAATCACAAC | ctccagagct | GTAATCACAAC | | |
| | | | (SEQ ID. NO: 1473) | (SEQ ID. | (SEQ ID. | | |
| | | | | NO: | NO: 1475) | | |
| | | | | 1474) | | | |
| 1b | zika_78 | CcaCas13b | ctttgcaccatccatctcagcctcc | ctttgcacca | GTTGGAACTGCT | Zika | 1b |
| | | | agagcGTTGGAACTGCTCTCATTTT | tccatctcag | CTCATTTTGGAGG | ssRNA | |
| | | | GGAGGGTAATCACAAC | cctccagag | GTAATCACAAC | | |
| | | | (SEQ ID. NO: 1476) | c (SEQ | (SEQ ID. | | |
| | | | | ID. NO: | NO: 1478) | | |
| | | | | 1477) | | | |
| 1b | zika_79 | CcaCas13b | cctttgcaccatccatctcagcctc | cctttgcacc | GTTGGAACTGCT | Zika | 1b |
| | | | cagagGTTGGAACTGCTCTCATTTT | atccatctca | CTCATTTTGGAGG | ssRNA | |
| | | | GGAGGGTAATCACAAC | gcctccaga | GTAATCACAAC | | |
| | | | (SEQ ID. NO: 1479) | g (SEQ | (SEQ ID. | | |
| | | | | ID. NO: | NO: 1481) | | |
| | | | | 1480) | | | |
| 1b | zika_80 | CcaCas13b | ccctttgcaccatccatctcagcct | ccctttgcac | GTTGGAACTGCT | Zika | 1b |
| | | | ccagaGTTGGAACTGCTCTCATTTT | catccatctc | CTCATTTTGGAGG | ssRNA | |
| | | | GGAGGGTAATCACAAC | agcctccag | GTAATCACAAC | | |
| | | | (SEQ ID. NO: 1482) | a (SEQ | (SEQ ID. | | |
| | | | | ID. NO: | NO: 1484) | | |
| | | | | 1483) | | | |
| 1b | zika_81 | CcaCas13b | tccctttgcaccatccatctcagcc | tccctttgca | GTTGGAACTGCT | Zika | 1b |
| | | | tccagGTTGGAACTGCTCTCATTTT | ccatccatct | CTCATTTTGGAGG | ssRNA | |
| | | | GGAGGGTAATCACAAC | cagcctcca | GTAATCACAAC | | |
| | | | (SEQ ID. NO: 1485) | g (SEQ | (SEQ ID. | | |
| | | | | ID. NO: | NO: 1487) | | |
| | | | | 1486) | | | |
| 1b | zika_82 | CcaCas13b | ttccctttgcaccatccatctcagc | ttccctttgca | GTTGGAACTGCT | Zika | 1b |
| | | | ctccaGTTGGAACTGCTCTCATTTT | ccatccatct | CTCATTTTGGAGG | ssRNA | |
| | | | GGAGGGTAATCACAAC | cagcctcca | GTAATCACAAC | | |
| | | | (SEQ ID. NO: 1488) | (SEQ ID. | (SEQ ID. | | |
| | | | | NO: | NO: 1490) | | |
| | | | | 1489) | | | |
| 1b | zika_83 | CcaCas13b | cttccctttgcaccatccatctcag | cttccctttgc | GTTGGAACTGCT | Zika | 1b |
| | | | cctccGTTGGAACTGCTCTCATTTT | accatccatc | CTCATTTTGGAGG | ssRNA | |
| | | | GGAGGGTAATCACAAC | tcagcctcc | GTAATCACAAC | | |
| | | | (SEQ ID. NO: 1491) | (SEQ ID. | (SEQ ID. | | |
| | | | | NO: | NO: 1493) | | |
| | | | | 1492) | | | |
| 1b | zika_84 | CcaCas13b | ccttccctttgcaccatccatctca | ccttccctttg | GTTGGAACTGCT | Zika | 1b |
| | | | gcctcGTTGGAACTGCTCTCATTTT | caccatccat | CTCATTTTGGAGG | ssRNA | |
| | | | GGAGGGTAATCACAAC | ctcagcctc | GTAATCACAAC | | |
| | | | (SEQ ID. NO: 1494) | (SEQ ID. | (SEQ ID. | | |
| | | | | NO: | NO: 1496) | | |
| | | | | 1495) | | | |
| 1b | zika_85 | CcaCas13b | gccttccctttgcaccatccatctc | gccttccctt | GTTGGAACTGCT | Zika | 1b |
| | | | agcctGTTGGAACTGCTCTCATTTT | tgcaccatcc | CTCATTTTGGAGG | ssRNA | |
| | | | GGAGGGTAATCACAAC | atctcagcct | GTAATCACAAC | | |
| | | | (SEQ ID. NO: 1497) | (SEQ ID. | (SEQ ID. | | |
| | | | | NO: | NO: 1499) | | |
| | | | | 1498) | | | |
| 1b | zika_86 | CcaCas13b | agccttccctttgcaccatccatct | agccttccct | GTTGGAACTGCT | Zika | 1b |
| | | | cagccGTTGGAACTGCTCTCATTTT | ttgcaccatc | CTCATTTTGGAGG | ssRNA | |
| | | | GGAGGGTAATCACAAC | catctcagcc | GTAATCACAAC | | |
| | | | (SEQ ID. NO: 1500) | (SEQ ID. | (SEQ ID. | | |
| | | | | NO: | NO: 1502) | | |
| | | | | 1501) | | | |
| 1b | zika_87 | CcaCas13b | cagccttccctttgcaccatccatc | cagccttccc | GTTGGAACTGCT | Zika | 1b |
| | | | tcagcGTTGGAACTGCTCTCATTTT | tttgcaccat | CTCATTTTGGAGG | ssRNA | |
| | | | GGAGGGTAATCACAAC | ccatctcagc | GTAATCACAAC | | |
| | | | (SEQ ID. NO: 1503) | (SEQ ID. | (SEQ ID. | | |
| | | | | NO: | NO: 1505) | | |
| | | | | 1504) | | | |
| 1b | zika_88 | CcaCas13b | acagccttccctttgcaccatccat | acagccttcc | GTTGGAACTGCT | Zika | 1b |
| | | | ctcagGTTGGAACTGCTCTCATTTT | ctttgcacca | CTCATTTTGGAGG | ssRNA | |
| | | | GGAGGGTAATCACAAC | tccatctcag | GTAATCACAAC | | |
| | | | (SEQ ID. NO: 1506) | (SEQ ID. | (SEQ ID. | | |
| | | | | NO: | NO: 1508) | | |
| | | | | 1507) | | | |
| 1b | zika_89 | CcaCas13b | gacagccttccctttgcaccatcca | gacagccttc | GTTGGAACTGCT | Zika | 1b |
| | | | tctcaGTTGGAACTGCTCTCATTTT | cctttgcacc | CTCATTTTGGAGG | ssRNA | |
| | | | GGAGGGTAATCACAAC | atccatctca | GTAATCACAAC | | |
| | | | (SEQ ID. NO: 1509) | (SEQ ID. | (SEQ ID. | | |
| | | | | NO: | NO: 1511) | | |
| | | | | 1510) | | | |
| 1b | zika_90 | CcaCas13b | ggacagccttccctttgcaccatcc | ggacagcct | GTTGGAACTGCT | Zika | 1b |
| | | | atctcGTTGGAACTGCTCTCATTTT | tccctttgca | CTCATTTTGGAGG | ssRNA | |
| | | | GGAGGGTAATCACAAC | ccatccatct | GTAATCACAAC | | |
| | | | (SEQ ID. NO: 1512) | c (SEQ | (SEQ ID. | | |
| | | | | ID. NO: | NO: 1514) | | |
| | | | | 1513) | | | |
| 1b | zika_91 | CcaCas13b | aggacagccttccctttgcaccatc | aggacagcc | GTTGGAACTGCT | Zika | 1b |
| | | | catctGTTGGAACTGCTCTCATTTT | ttccctttgca | CTCATTTTGGAGG | ssRNA | |
| | | | GGAGGGTAATCACAAC | ccatccatct | GTAATCACAAC | | |
| | | | (SEQ ID. NO: 1515) | (SEQ ID. | (SEQ ID. | | |
| | | | | NO: | NO: 1517) | | |
| | | | | 1516) | | | |
| 1b | zika_92 | CcaCas13b | gaggacagccttccctttgcaccat | gaggacagc | GTTGGAACTGCT | Zika | 1b |
| | | | ccatcGTTGGAACTGCTCTCATTTT | cttccctttgc | CTCATTTTGGAGG | ssRNA | |
| | | | GGAGGGTAATCACAAC | accatccatc | GTAATCACAAC | | |
| | | | (SEQ ID. NO: 1518) | (SEQ ID. | (SEQ ID. | | |
| | | | | NO: | NO: 1520) | | |
| | | | | 1519) | | | |
| 1b | zika_93 | CcaCas13b | agaggacagccttccctttgcacca | agaggacag | GTTGGAACTGCT | Zika | 1b |
| | | | tccatGTTGGAACTGCTCTCATTTT | ccttccctttg | CTCATTTTGGAGG | ssRNA | |
| | | | GGAGGGTAATCACAAC | caccatccat | GTAATCACAAC | | |
| | | | (SEQ ID. NO: 1521) | (SEQ ID. | (SEQ ID. | | |
| | | | | NO: | NO: 1523) | | |
| | | | | 1522) | | | |
| 1b | zika_94 | CcaCas13b | cagaggacagccttccctttgcacc | cagaggaca | GTTGGAACTGCT | Zika | 1b |
| | | | atccaGTTGGAACTGCTCTCATTTT | gccttcccttt | CTCATTTTGGAGG | ssRNA | |
| | | | GGAGGGTAATCACAAC | gcaccatcc | GTAATCACAAC | | |
| | | | (SEQ ID. NO: 1524) | a (SEQ | (SEQ ID. | | |
| | | | | ID. NO: | NO: 1526) | | |
| | | | | 1525) | | | |
| 7a | dengue_0 | CcaCas13b | tgttgagaggttggcccctgaatat | tgttgagagg | GTTGGAACTGCT | Dengue | 7a |
| | | | gtactGTTGGAACTGCTCTCATTTT | ttggcccctg | CTCATTTTGGAGG | ssRNA | |
| | | | GGAGGGTAATCACAAC | aatatgtact | GTAATCACAAC | | |
| | | | (SEQ ID. NO: 1527) | (SEQ ID. | (SEQ ID. | | |
| | | | | NO: | NO: 1529) | | |
| | | | | 1528) | | | |
| 7a | dengue_1 | CcaCas13b | ttgttgagaggttggcccctgaata | ttgttgagag | GTTGGAACTGCT | Dengue | 7a |
| | | | gttacGTTGGAACTGCTCTCATTTT | gttggcccct | CTCATTTTGGAGG | ssRNA | |
| | | | GGAGGGTAATCACAAC | gaatatgtac | GTAATCACAAC | | |
| | | | (SEQ ID. NO: 1530) | (SEQ ID. | (SEQ ID. | | |
| | | | | NO: | NO: 1532) | | |
| | | | | 1531) | | | |
| 7a | dengue_2 | CcaCas13b | attgttgagaggttggcccctgaat | attgttgaga | GTTGGAACTGCT | Dengue | 7a |
| | | | atgtaGTTGGAACTGCTCTCATTTT | ggttggccc | CTCATTTTGGAGG | ssRNA | |
| | | | GGAGGGTAATCACAAC | ctgaatatgt | GTAATCACAAC | | |
| | | | (SEQ ID. NO: 1533) | a (SEQ | (SEQ ID. | | |
| | | | | ID. NO: | NO: 1535) | | |
| | | | | 1534) | | | |
| 7a | dengue_3 | CcaCas13b | cattgttgagaggttggcccctgaa | cattgttgag | GTTGGAACTGCT | Dengue | 7a |
| | | | tatgtGTTGGAACTGCTCTCATTTT | aggttggcc | CTCATTTTGGAGG | ssRNA | |
| | | | GGAGGGTAATCACAAC | cctgaatatg | GTAATCACAAC | | |
| | | | (SEQ ID. NO: 1536) | t (SEQ | (SEQ ID. | | |
| | | | | ID. NO: | NO: 1538) | | |
| | | | | 1537) | | | |
| 7a | dengue_4 | CcaCas13b | tcattgttgagaggttggcccctga | tcattgttgag | GTTGGAACTGCT | Dengue | 7a |
| | | | atatgGTTGGAACTGCTCTCATTTT | aggttggcc | CTCATTTTGGAGG | ssRNA | |
| | | | GGAGGGTAATCACAAC | cctgaatatg | GTAATCACAAC | | |
| | | | (SEQ ID. NO: 1539) | (SEQ ID. | (SEQ ID. | | |
| | | | | NO: | NO: 1541) | | |
| | | | | 1540) | | | |
| 7a | dengue_5 | CcaCas13b | gtcattgttgagaggttggcccctg | gtcattgttga | GTTGGAACTGCT | Dengue | 7a |
| | | | aatatGTTGGAACTGCTCTCATTTT | gaggttggc | CTCATTTTGGAGG | ssRNA | |
| | | | GGAGGGTAATCACAAC | ccctgaatat | GTAATCACAAC | | |
| | | | (SEQ ID. NO: 1542) | (SEQ ID. | (SEQ ID. | | |
| | | | | NO: | NO: 1544) | | |
| | | | | 1543) | | | |
| 7a | dengue_6 | CcaCas13b | cgtcattgttgagaggttggcccct | cgtcattgttg | GTTGGAACTGCT | Dengue | 7a |
| | | | gaataGTTGGAACTGCTCTCATTTT | agaggttgg | CTCATTTTGGAGG | ssRNA | |
| | | | GGAGGGTAATCACAAC | cccctgaata | GTAATCACAAC | | |
| | | | (SEQ ID. NO: 1545) | (SEQ ID. | (SEQ ID. | | |
| | | | | NO: | NO: 1547) | | |
| | | | | 1546) | | | |
| 7a | dengue_7 | CcaCas13b | tcgtcattgttgagaggttggcccc | tcgtcattgtt | GTTGGAACTGCT | Dengue | 7a |
| | | | tgaatGTTGGAACTGCTCTCATTTT | gagaggttg | CTCATTTTGGAGG | ssRNA | |
| | | | GGAGGGTAATCACAAC | gcccctgaat | GTAATCACAAC | | |
| | | | (SEQ ID. NO: 1548) | (SEQ ID. | (SEQ ID. | | |
| | | | | NO: | NO: 1550) | | |
| | | | | 1549) | | | |
| 7a | dengue_8 | CcaCas13b | ttcgtcattgttgagaggttggccc | ttcgtcattgt | GTTGGAACTGCT | Dengue | 7a |
| | | | ctgaaGTTGGAACTGCTCTCATTTT | tgagaggttg | CTCATTTTGGAGG | ssRNA | |
| | | | GGAGGGTAATCACAAC | gcccctgaa | GTAATCACAAC | | |
| | | | (SEQ ID. NO: 1551) | (SEQ ID. | (SEQ ID. | | |
| | | | | NO: | NO: 1553) | | |
| | | | | 1552) | | | |
| 7a | dengue_9 | CcaCas13b | cttcgtcattgttgagaggttggcc | cttcgtcattg | GTTGGAACTGCT | Dengue | 7a |
| | | | cctgaGTTGGAACTGCTCTCATTTT | ttgagaggtt | CTCATTTTGGAGG | ssRNA | |
| | | | GGAGGGTAATCACAAC | ggcccctga | GTAATCACAAC | | |
| | | | (SEQ ID. NO: 1554) | (SEQ ID. | (SEQ ID. | | |
| | | | | NO: | NO: 1556) | | |
| | | | | 1555) | | | |
| 7a | dengue_1 | CcaCas13b | tcttcgtcattgttgagaggttggc | tcttcgtcatt | GTTGGAACTGCT | Dengue | 7a |
| | 0 | | ccctgGTTGGAACTGCTCTCATTTT | gttgagaggt | CTCATTTTGGAGG | ssRNA | |
| | | | GGAGGGTAATCACAAC | tggcccctg | GTAATCACAAC | | |
| | | | (SEQ ID. NO: 1557) | (SEQ ID. | (SEQ ID. | | |
| | | | | NO: | NO: 1559) | | |
| | | | | 1558) | | | |
| 7a | dengue_1 | CcaCas13b | gtcttcgtcattgttgagaggttgg | gtcttcgtcat | GTTGGAACTGCT | Dengue | 7a |
| | 1 | | cccctGTTGGAACTGCTCTCATTTT | tgttgagagg | CTCATTTTGGAGG | ssRNA | |
| | | | GGAGGGTAATCACAAC | ttggcccct | GTAATCACAAC | | |
| | | | (SEQ ID. NO: 1560) | (SEQ ID. | (SEQ ID. | | |
| | | | | NO: | NO: 1562) | | |
| | | | | 1561) | | | |
| 7a | dengue_1 | CcaCas13b | ggtcttcgtcattgttgagaggttg | ggtcttcgtc | GTTGGAACTGCT | Dengue | 7a |
| | 2 | | gccccGTTGGAACTGCTCTCATTTT | attgttgaga | CTCATTTTGGAGG | ssRNA | |
| | | | GGAGGGTAATCACAAC | ggttggccc | GTAATCACAAC | | |
| | | | (SEQ ID. NO: 1563) | c (SEQ | (SEQ ID. | | |
| | | | | ID. NO: | NO: 1565) | | |
| | | | | 1564) | | | |
| 7a | dengue_1 | CcaCas13b | tggtcttcgtcattgttgagaggtt | tggtcttcgtc | GTTGGAACTGCT | Dengue | 7a |
| | 3 | | ggcccGTTGGAACTGCTCTCATTTT | attgttgaga | CTCATTTTGGAGG | ssRNA | |
| | | | GGAGGGTAATCACAAC | ggttggccc | GTAATCACAAC | | |
| | | | (SEQ ID. NO: 1566) | (SEQ ID. | (SEQ ID. | | |
| | | | | NO: | NO: 1568) | | |
| | | | | 1567) | | | |
| 7a | dengue_1 | CcaCas13b | atggtcttcgtcattgttgagaggt | atggtcttcgt | GTTGGAACTGCT | Dengue | 7a |
| | 4 | | tggccGTTGGAACTGCTCTCATTTT | cattgttgag | CTCATTTTGGAGG | ssRNA | |
| | | | GGAGGGTAATCACAAC | aggttggcc | GTAATCACAAC | | |
| | | | (SEQ ID. NO: 1569) | (SEQ ID. | (SEQ ID. | | |
| | | | | NO: | NO: 1571) | | |
| | | | | 1570) | | | |
| 7a | dengue_1 | CcaCas13b | catggtcttcgtcattgttgagagg | catggtcttc | GTTGGAACTGCT | Dengue | 7a |
| | 5 | | ttggcGTTGGAACTGCTCTCATTTT | gtcattgttga | CTCATTTTGGAGG | ssRNA | |
| | | | GGAGGGTAATCACAAC | gaggttggc | GTAATCACAAC | | |
| | | | (SEQ ID. NO: 1572) | (SEQ ID. | (SEQ ID. | | |
| | | | | NO: | NO: 1574) | | |
| | | | | 1573) | | | |
| 7a | dengue_1 | CcaCas13b | gcatggtcttcgtcattgttgagag | gcatggtctt | GTTGGAACTGCT | Dengue | 7a |
| | 6 | | gttggGTTGGAACTGCTCTCATTTT | cgtcattgttg | CTCATTTTGGAGG | ssRNA | |
| | | | GGAGGGTAATCACAAC | agaggttgg | GTAATCACAAC | | |
| | | | (SEQ ID. NO: 1575) | (SEQ ID. | (SEQ ID. | | |
| | | | | NO: | NO: 1577) | | |
| | | | | 1576) | | | |
| 7a | dengue_1 | CcaCas13b | agcatggtcttcgtcattgttgaga | agcatggtct | GTTGGAACTGCT | Dengue | 7a |
| | 7 | | ggttgGTTGGAACTGCTCTCATTTT | tcgtcattgtt | CTCATTTTGGAGG | ssRNA | |
| | | | GGAGGGTAATCACAAC | gagaggttg | GTAATCACAAC | | |
| | | | (SEQ ID. NO: 1578) | (SEQ ID. | (SEQ ID. | | |
| | | | | NO: | NO: 1580) | | |
| | | | | 1579) | | | |
| 7a | dengue_1 | CcaCas13b | gagcatggtcttcgtcattgttgag | gagcatggt | GTTGGAACTGCT | Dengue | 7a |
| | 8 | | aggttGTTGGAACTGCTCTCATTTT | cttcgtcattg | CTCATTTTGGAGG | ssRNA | |
| | | | GGAGGGTAATCACAAC | ttgagaggtt | GTAATCACAAC | | |
| | | | (SEQ ID. NO: 1581) | (SEQ ID. | (SEQ ID. | | |
| | | | | NO: | NO: 1583) | | |
| | | | | 1582) | | | |
| 7a | dengue_1 | CcaCas13b | tgagcatggtcttcgtcattgttga | tgagcatggt | GTTGGAACTGCT | Dengue | 7a |
| | 9 | | gaggtGTTGGAACTGCTCTCATTTT | cttcgtcattg | CTCATTTTGGAGG | ssRNA | |
| | | | GGAGGGTAATCACAAC | ttgagaggt | GTAATCACAAC | | |
| | | | (SEQ ID. NO: 1584) | (SEQ ID. | (SEQ ID. | | |
| | | | | NO: | NO: 1586) | | |
| | | | | 1585) | | | |
| 7a | dengue_2 | CcaCas13b | agtgagcatggtcttcgtcattgtt | agtgagcat | GTTGGAACTGCT | Dengue | 7a |
| | 0 | | gagagGTTGGAACTGCTCTCATTTT | ggtcttcgtc | CTCATTTTGGAGG | ssRNA | |
| | | | GGAGGGTAATCACAAC | attgttgaga | GTAATCACAAC | | |
| | | | (SEQ ID. NO: 1587) | g (SEQ | (SEQ ID. | | |
| | | | | ID. NO: | NO: 1589) | | |
| | | | | 1588) | | | |
| 7a | dengue_2 | CcaCas13b | ccagtgagcatggtcttcgtcattg | ccagtgagc | GTTGGAACTGCT | Dengue | 7a |
| | 1 | | ttgagGTTGGAACTGCTCTCATTTT | atggtcttcgt | CTCATTTTGGAGG | ssRNA | |
| | | | GGAGGGTAATCACAAC | cattgttgag | GTAATCACAAC | | |
| | | | (SEQ ID. NO: 1590) | (SEQ ID. | (SEQ ID. | | |
| | | | | NO: | NO: 1592) | | |
| | | | | 1591) | | | |
| 7a | dengue_2 | CcaCas13b | gtccagtgagcatggtcttcgtcat | gtccagtga | GTTGGAACTGCT | Dengue | 7a |
| | 2 | | tgttgGTTGGAACTGCTCTCATTTT | gcatggtctt | CTCATTTTGGAGG | ssRNA | |
| | | | GGAGGGTAATCACAAC | cgtcattgttg | GTAATCACAAC | | |
| | | | (SEQ ID. NO: 1593) | (SEQ ID. | (SEQ ID. | | |
| | | | | NO: | NO: 1595) | | |
| | | | | 1594) | | | |
| 7a | dengue_2 | CcaCas13b | ctgtccagtgagcatggtcttcgtc | ctgtccagtg | GTTGGAACTGCT | Dengue | 7a |
| | 3 | | attgtGTTGGAACTGCTCTCATTTT | agcatggtct | CTCATTTTGGAGG | ssRNA | |
| | | | GGAGGGTAATCACAAC | tcgtcattgt | GTAATCACAAC | | |
| | | | (SEQ ID. NO: 1596) | (SEQ ID. | (SEQ ID. | | |
| | | | | NO: | NO: 1598) | | |
| | | | | 1597) | | | |
| 7a | dengue_2 | CcaCas13b | ttctgtccagtgagcatggtcttcg | ttctgtccagt | GTTGGAACTGCT | Dengue | 7a |
| | 4 | | tcattGTTGGAACTGCTCTCATTTT | gagcatggt | CTCATTTTGGAGG | ssRNA | |
| | | | GGAGGGTAATCACAAC | cttcgtcatt | GTAATCACAAC | | |
| | | | (SEQ ID. NO: 1599) | (SEQ ID. | (SEQ ID. | | |
| | | | | NO: | NO: 1601) | | |
| | | | | 1600) | | | |
| 7a | dengue_2 | CcaCas13b | gcttctgtccagtgagcatggtctt | gcttctgtcc | GTTGGAACTGCT | Dengue | 7a |
| | 5 | | cgtcaGTTGGAACTGCTCTCATTTT | agtgagcat | CTCATTTTGGAGG | ssRNA | |
| | | | GGAGGGTAATCACAAC | ggtcttcgtc | GTAATCACAAC | | |
| | | | (SEQ ID. NO: 1602) | a (SEQ | (SEQ ID. | | |
| | | | | ID. NO: | NO: 1604) | | |
| | | | | 1603) | | | |
| 7a | dengue_2 | CcaCas13b | ttgcttctgtccagtgagcatggtc | ttgcttctgtc | GTTGGAACTGCT | Dengue | 7a |
| | 6 | | ttcgtGTTGGAACTGCTCTCATTTT | cagtgagca | CTCATTTTGGAGG | ssRNA | |
| | | | GGAGGGTAATCACAAC | tggtcttcgt | GTAATCACAAC | | |
| | | | (SEQ ID. NO: 1605) | (SEQ ID. | (SEQ ID. | | |
| | | | | NO: | NO: 1607) | | |
| | | | | 1606) | | | |
| 7a | dengue_2 | CcaCas13b | ttttgcttctgtccagtgagcatgg | ttttgcttctg | GTTGGAACTGCT | Dengue | 7a |
| | 7 | | tTGGAACTGCTCTCATTTTG | tccagtgagc | CTCATTTTGGAGG | ssRNA | |
| | | | cttcGTGAGGGTAATCACAAC | atggtcttc | GTAATCACAAC | | |
| | | | (SEQ ID. NO: 1608) | (SEQ ID. | (SEQ ID. | | |
| | | | | NO: | NO: 1610) | | |
| | | | | 1609) | | | |
| 7a | dengue_2 | CcaCas13b | atttttgcttctgtccagtgagcat | atttttgcttc | GTTGGAACTGCT | Dengue | 7a |
| | 8 | | ggtctGTTGGAACTGCTCTCATTTT | tgtccagtga | CTCATTTTGGAGG | ssRNA | |
| | | | GGAGGGTAATCACAAC | gcatggtct | GTAATCACAAC | | |
| | | | (SEQ ID. NO: 1611) | (SEQ ID. | (SEQ ID. | | |
| | | | | NO: | NO: 1613) | | |
| | | | | 1612) | | | |
| 7a | dengue_2 | CcaCas13b | gcatttttgcttctgtccagtgagc | gcatttttgct | GTTGGAACTGCT | Dengue | 7a |
| | 9 | | atggtGTTGGAACTGCTCTCATTTT | tctgtccagt | CTCATTTTGGAGG | ssRNA | |
| | | | GGAGGGTAATCACAAC | gagcatggt | GTAATCACAAC | | |
| | | | (SEQ ID. NO: 1614) | (SEQ ID. | (SEQ ID. | | |
| | | | | NO: | NO: 1616) | | |
| | | | | 1615) | | | |
| 7a | dengue_3 | CcaCas13b | cagcatttttgcttctgtccagtga | cagcatttttg | GTTGGAACTGCT | Dengue | 7a |
| | 0 | | gcatgGTTGGAACTGCTCTCATTTT | cttctgtcca | CTCATTTTGGAGG | ssRNA | |
| | | | GGAGGGTAATCACAAC | gtgagcatg | GTAATCACAAC | | |
| | | | (SEQ ID. NO: 1617) | (SEQ ID. | (SEQ ID. | | |
| | | | | NO: | NO: 1619) | | |
| | | | | 1618) | | | |
| 7a | dengue_3 | CcaCas13b | agcagcatttttgcttctgtccagt | agcagcattt | GTTGGAACTGCT | Dengue | 7a |
| | 1 | | gagcaGTTGGAACTGCTCTCATTTT | ttgcttctgtc | CTCATTTTGGAGG | ssRNA | |
| | | | GGAGGGTAATCACAAC | cagtgagca | GTAATCACAAC | | |
| | | | (SEQ ID. NO: 1620) | (SEQ ID. | (SEQ ID. | | |
| | | | | NO: | NO: 1622) | | |
| | | | | 1621) | | | |
| 7a | dengue_3 | CcaCas13b | ccagcagcatttttgcttctgtcca | ccagcagca | GTTGGAACTGCT | Dengue | 7a |
| | 2 | | gtgagGTTGGAACTGCTCTCATTTT | tttttgcttct | CTCATTTTGGAGG | ssRNA | |
| | | | GGAGGGTAATCACAAC | gtccagtgag | GTAATCACAAC | | |
| | | | (SEQ ID. NO: 1623) | (SEQ ID. | (SEQ ID. | | |
| | | | | NO: | NO: 1625) | | |
| | | | | 1624) | | | |
| 7a | dengue_3 | CcaCas13b | gtccagcagcatttttgcttctgtc | gtccagcag | GTTGGAACTGCT | Dengue | 7a |
| | 3 | | cagtgGTTGGAACTGCTCTCATTTT | catttttgctt | CTCATTTTGGAGG | ssRNA | |
| | | | GGAGGGTAATCACAAC | ctgtccagtg | GTAATCACAAC | | |
| | | | (SEQ ID. NO: 1626) | (SEQ ID. | (SEQ ID. | | |
| | | | | NO: | NO: 1628) | | |
| | | | | 1627) | | | |
| 7a | dengue_3 | CcaCas13b | ttgtccagcagcatttttgcttctg | ttgtccagca | GTTGGAACTGCT | Dengue | 7a |
| | 4 | | tTccagGTGGAACTGCTCTCATTTT | gcatttttgct | CTCATTTTGGAGG | ssRNA | |
| | | | GGAGGGTAATCACAAC | tctgtccag | GTAATCACAAC | | |
| | | | (SEQ ID. NO: 1629) | (SEQ ID. | (SEQ ID. | | |
| | | | | NO: | NO: 1631) | | |
| | | | | 1630) | | | |
| 7a | dengue_3 | CcaCas13b | tgttgtccagcagcatttttgcttc | tgttgtccag | GTTGGAACTGCT | Dengue | 7a |
| | 5 | | tgtccGTTGGAACTGCTCTCATTTT | cagcatttttg | CTCATTTTGGAGG | ssRNA | |
| | | | GGAGGGTAATCACAAC | cttctgtcc | GTAATCACAAC | | |
| | | | (SEQ ID. NO: 1632) | (SEQ ID. | (SEQ ID. | | |
| | | | | NO: | NO: 1634) | | |
| | | | | 1633) | | | |
| 7a | dengue_3 | CcaCas13b | gatgttgtccagcagcatttttgct | gatgttgtcc | GTTGGAACTGCT | Dengue | 7a |
| | 6 | | tctgtGTTGGAACTGCTCTCATTTT | agcagcattt | CTCATTTTGGAGG | ssRNA | |
| | | | GGAGGGTAATCACAAC | ttgettctgt | GTAATCACAAC | | |
| | | | (SEQ ID. NO: 1635) | (SEQ ID. | (SEQ ID. | | |
| | | | | NO: | NO: 1637) | | |
| | | | | 1636) | | | |
| 7a | dengue_3 | CcaCas13b | ttgatgttgtccagcagcatttttg | ttgatgttgtc | GTTGGAACTGCT | Dengue | 7a |
| | 7 | | cttctGTTGGAACTGCTCTCATTTT | cagcagcatt | CTCATTTTGGAGG | ssRNA | |
| | | | GGAGGGTAATCACAAC | tttgettct | GTAATCACAAC | | |
| | | | (SEQ ID. NO: 1638) | (SEQ ID. | (SEQ ID. | | |
| | | | | NO: | NO: 1640) | | |
| | | | | 1639) | | | |
| 7a | dengue_3 | CcaCas13b | tgttgatgttgtccagcagcatttt | tgttgatgttg | GTTGGAACTGCT | Dengue | 7a |
| | 8 | | tgcttGTTGGAACTGCTCTCATTTT | tccagcagc | CTCATTTTGGAGG | ssRNA | |
| | | | GGAGGGTAATCACAAC | atttttgctt | GTAATCACAAC | | |
| | | | (SEQ ID. NO: 1641) | (SEQ ID. | (SEQ ID. | | |
| | | | | NO: | NO: 1643) | | |
| | | | | 1642) | | | |
| 7a | dengue_3 | CcaCas13b | tgtgttgatgttgtccagcagcatt | tgtgttgatgt | GTTGGAACTGCT | Dengue | 7a |
| | 9 | | tttgcGTTGGAACTGCTCTCATTTT | tgtccagca | CTCATTTTGGAGG | ssRNA | |
| | | | GGAGGGTAATCACAAC | gcatttttgc | GTAATCACAAC | | |
| | | | (SEQ ID. NO: 1644) | (SEQ ID. | (SEQ ID. | | |
| | | | | NO: | NO: 1646) | | |
| | | | | 1645) | | | |
| 7a | dengue_4 | CcaCas13b | ggtgtgttgatgttgtccagcagca | ggtgtgttga | GTTGGAACTGCT | Dengue | 7a |
| | 0 | | tttttGTTGGAACTGCTCTCATTTT | tgttgtccag | CTCATTTTGGAGG | ssRNA | |
| | | | GGAGGGTAATCACAAC | cagcattttt | GTAATCACAAC | | |
| | | | (SEQ ID. NO: 1647) | (SEQ ID. | (SEQ ID. | | |
| | | | | NO: | NO: 1649) | | |
| | | | | 1648) | | | |
| 7a | dengue_4 | CcaCas13b | ctggtgtgttgatgttgtccagcag | ctggtgtgtt | GTTGGAACTGCT | Dengue | 7a |
| | 1 | | catttGTTGGAACTGCTCTCATTTT | gatgttgtcc | CTCATTTTGGAGG | ssRNA | |
| | | | GGAGGGTAATCACAAC | agcagcattt | GTAATCACAAC | | |
| | | | (SEQ ID. NO: 1650) | (SEQ ID. | (SEQ ID. | | |
| | | | | NO: | NO: 1652) | | |
| | | | | 1651) | | | |
| 7a | dengue_4 | CcaCas13b | ttctggtgtgttgatgttgtccagc | ttctggtgtgt | GTTGGAACTGCT | Dengue | 7a |
| | 2 | | agcatGTTGGAACTGCTCTCATTTT | tgatgttgtcc | CTCATTTTGGAGG | ssRNA | |
| | | | GGAGGGTAATCACAAC | agcagcat | GTAATCACAAC | | |
| | | | (SEQ ID. NO: 1653) | (SEQ ID. | (SEQ ID. | | |
| | | | | NO: | NO: 1655) | | |
| | | | | 1654) | | | |
| 7a | dengue_4 | CcaCas13b | ccttctggtgtgttgatgttgtcca | ccttctggtgt | GTTGGAACTGCT | Dengue | 7a |
| | 3 | | gcagcGTTGGAACTGCTCTCATTTT | gttgatgttgt | CTCATTTTGGAGG | ssRNA | |
| | | | GGAGGGTAATCACAAC | ccagcagc | GTAATCACAAC | | |
| | | | (SEQ ID. NO: 1656) | (SEQ ID. | (SEQ ID. | | |
| | | | | NO: | NO: 1658) | | |
| | | | | 1657) | | | |
| 7a | dengue_4 | CcaCas13b | tcccttctggtgtgttgatgttgtc | tcccttctggt | GTTGGAACTGCT | Dengue | 7a |
| | 4 | | cagcaGTTGGAACTGCTCTCATTTT | gtgttgatgtt | CTCATTTTGGAGG | ssRNA | |
| | | | GGAGGGTAATCACAAC | gtccagca | GTAATCACAAC | | |
| | | | (SEQ ID. NO: 1659) | (SEQ ID. | (SEQ ID. | | |
| | | | | NO: | NO: 1661) | | |
| | | | | 1660) | | | |
| 7a | dengue_4 | CcaCas13b | aatcccttctggtgtgttgatgttg | aatcccttct | GTTGGAACTGCT | Dengue | 7a |
| | 5 | | tccagGTTGGAACTGCTCTCATTTT | ggtgtgttga | CTCATTTTGGAGG | ssRNA | |
| | | | GGAGGGTAATCACAAC | tgttgtccag | GTAATCACAAC | | |
| | | | (SEQ ID. NO: 1662) | (SEQ ID. | (SEQ ID. | | |
| | | | | NO: | NO: 1664) | | |
| | | | | 1663) | | | |
| 7a | dengue_4 | CcaCas13b | ataatcccttctggtgtgttgatgt | ataatcccttc | GTTGGAACTGCT | Dengue | 7a |
| | 6 | | tgtccGTTGGAACTGCTCTCATTTT | tggtgtgttg | CTCATTTTGGAGG | ssRNA | |
| | | | GGAGGGTAATCACAAC | atgttgtcc | GTAATCACAAC | | |
| | | | (SEQ ID. NO: 1665) | (SEQ ID. | (SEQ ID. | | |
| | | | | NO: | NO: 1667) | | |
| | | | | 1666) | | | |
| 7a | dengue_4 | CcaCas13b | gtataatcccttctggtgtgttgat | gtataatccc | GTTGGAACTGCT | Dengue | 7a |
| | 7 | | gttgtGTTGGAACTGCTCTCATTTT | ttctggtgtgt | CTCATTTTGGAGG | ssRNA | |
| | | | GGAGGGTAATCACAAC | tgatgttgt | GTAATCACAAC | | |
| | | | (SEQ ID. NO: 1668) | (SEQ ID. | (SEQ ID. | | |
| | | | | NO: | NO: 1670) | | |
| | | | | 1669) | | | |
| 7a | dengue_4 | CcaCas13b | tggtataatcccttctggtgtgttg | tggtataatc | GTTGGAACTGCT | Dengue | 7a |
| | 8 | | atgttGTTGGAACTGCTCTCATTTT | ccttctggtgt | CTCATTTTGGAGG | ssRNA | |
| | | | GGAGGGTAATCACAAC | gttgatgtt | GTAATCACAAC | | |
| | | | (SEQ ID. NO: 1671) | (SEQ ID. | (SEQ ID. | | |
| | | | | NO: | NO: 1673) | | |
| | | | | 1672) | | | |
| 7a | dengue_4 | CcaCas13b | gctggtataatcccttctggtgtgt | gctggtataa | GTTGGAACTGCT | Dengue | 7a |
| | 9 | | tgatgGTTGGAACTGCTCTCATTTT | tcccttctggt | CTCATTTTGGAGG | ssRNA | |
| | | | GGAGGGTAATCACAAC | gtgttgatg | GTAATCACAAC | | |
| | | | (SEQ ID. NO: 1674) | (SEQ ID. | (SEQ ID. | | |
| | | | | NO: | NO: 1676) | | |
| | | | | 1675) | | | |
| 7a | dengue_5 | CcaCas13b | gagctggtataatcccttctggtgt | gagctggtat | GTTGGAACTGCT | Dengue | 7a |
| | 0 | | gttgaGTTGGAACTGCTCTCATTTT | aatcccttct | CTCATTTTGGAGG | ssRNA | |
| | | | GGAGGGTAATCACAAC | ggtgtgttga | GTAATCACAAC | | |
| | | | (SEQ ID. NO: 1677) | (SEQ ID. | (SEQ ID. | | |
| | | | | NO: | NO: 1679) | | |
| | | | | 1678) | | | |
| 7a | dengue_5 | CcaCas13b | gagagctggtataatcccttctggt | gagagctgg | GTTGGAACTGCT | Dengue | 7a |
| | 1 | | gtgttGTTGGAACTGCTCTCATTTT | tataatccctt | CTCATTTTGGAGG | ssRNA | |
| | | | GGAGGGTAATCACAAC | ctggtgtgtt | GTAATCACAAC | | |
| | | | (SEQ ID. NO: 1680) | (SEQ ID. | (SEQ ID. | | |
| | | | | NO: | NO: 1682) | | |
| | | | | 1681) | | | |
| 7a | dengue_5 | CcaCas13b | aagagagctggtataatcccttctg | aagagagct | GTTGGAACTGCT | Dengue | 7a |
| | 2 | | gtgtgGTTGGAACTGCTCTCATTTT | ggtataatcc | CTCATTTTGGAGG | ssRNA | |
| | | | GGAGGGTAATCACAAC | cttctggtgt | GTAATCACAAC | | |
| | | | (SEQ ID. NO: 1683) | g (SEQ | (SEQ ID. | | |
| | | | | ID. NO: | NO: 1685) | | |
| | | | | 1684) | | | |
| 7a | dengue_5 | CcaCas13b | caaagagagctggtataatcccttc | caaagagag | GTTGGAACTGCT | Dengue | 7a |
| | 3 | | tggtgGTTGGAACTGCTCTCATTTT | ctggtataat | CTCATTTTGGAGG | ssRNA | |
| | | | GGAGGGTAATCACAAC | cccttctggt | GTAATCACAAC | | |
| | | | (SEQ ID. NO: 1686) | g (SEQ | (SEQ ID. | | |
| | | | | ID. NO: | NO: 1688) | | |
| | | | | 1687) | | | |
| 7a | dengue_5 | CcaCas13b | ttcaaagagagctggtataatccct | ttcaaagaga | GTTGGAACTGCT | Dengue | 7a |
| | 4 | | tctggGTTGGAACTGCTCTCATTTT | gctggtataa | CTCATTTTGGAGG | ssRNA | |
| | | | GGAGGGTAATCACAAC | tcccttctgg | GTAATCACAAC | | |
| | | | (SEQ ID. NO: 1689) | (SEQ ID. | (SEQ ID. | | |
| | | | | NO: | NO: 1691) | | |
| | | | | 1690) | | | |
| 7a | dengue_5 | CcaCas13b | ggttcaaagagagctggtataatcc | ggttcaaag | GTTGGAACTGCT | Dengue | 7a |
| | 5 | | cttctGTTGGAACTGCTCTCATTTT | agagctggt | CTCATTTTGGAGG | ssRNA | |
| | | | GGAGGGTAATCACAAC | ataatcccttc | GTAATCACAAC | | |
| | | | (SEQ ID. NO: 1692) | t (SEQ | (SEQ ID. | | |
| | | | | ID. NO: | NO: 1694) | | |
| | | | | 1693) | | | |
| 7a | dengue_5 | CcaCas13b | ctggttcaaagagagctggtataat | ctggttcaaa | GTTGGAACTGCT | Dengue | 7a |
| | 6 | | cccttGTTGGAACTGCTCTCATTTT | gagagctgg | CTCATTTTGGAGG | ssRNA | |
| | | | GGAGGGTAATCACAAC | tataatccctt | GTAATCACAAC | | |
| | | | (SEQ ID. NO: 1695) | (SEQ ID. | (SEQ ID. | | |
| | | | | NO: | NO: 1697) | | |
| | | | | 1696) | | | |
| 7a | dengue_5 | CcaCas13b | ttctggttcaaagagagctggtata | ttctggttcaa | GTTGGAACTGCT | Dengue | 7a |
| | 7 | | atcccGTTGGAACTGCTCTCATTTT | agagagctg | CTCATTTTGGAGG | ssRNA | |
| | | | GGAGGGTAATCACAAC | gtataatccc | GTAATCACAAC | | |
| | | | (SEQ ID. NO: 1698) | (SEQ ID. | (SEQ ID. | | |
| | | | | NO: | NO: 1700) | | |
| | | | | 1699) | | | |
| 7a | dengue_5 | CcaCas13b | ctttctggttcaaagagagctggta | ctttctggttc | GTTGGAACTGCT | Dengue | 7a |
| | 8 | | taatcGTTGGAACTGCTCTCATTTT | aaagagagc | CTCATTTTGGAGG | ssRNA | |
| | | | GGAGGGTAATCACAAC | tggtataatc | GTAATCACAAC | | |
| | | | (SEQ ID. NO: 1701) | (SEQ ID. | (SEQ ID. | | |
| | | | | NO: | NO: 1703) | | |
| | | | | 1702) | | | |
| 7a | dengue_5 | CcaCas13b | ccctttctggttcaaagagagctgg | ccctttctggt | GTTGGAACTGCT | Dengue | 7a |
| | 9 | | tataaGTTGGAACTGCTCTCATTTT | tcaaagaga | CTCATTTTGGAGG | ssRNA | |
| | | | GGAGGGTAATCACAAC | gctggtataa | GTAATCACAAC | | |
| | | | (SEQ ID. NO: 1704) | (SEQ ID. | (SEQ ID. | | |
| | | | | NO: | NO: 1706) | | |
| | | | | 1705) | | | |
| 7a | dengue_6 | CcaCas13b | ctccctttctggttcaaagagagct | ctccctttctg | GTTGGAACTGCT | Dengue | 7a |
| | 0 | | ggtatGTTGGAACTGCTCTCATTTT | gttcaaaga | CTCATTTTGGAGG | ssRNA | |
| | | | GGAGGGTAATCACAAC | gagctggtat | GTAATCACAAC | | |
| | | | (SEQ ID. NO: 1707) | (SEQ ID. | (SEQ ID. | | |
| | | | | NO: | NO: 1709) | | |
| | | | | 1708) | | | |
| 7a | dengue_6 | CcaCas13b | ttctccctttctggttcaaagagag | ttctccctttc | GTTGGAACTGCT | Dengue | 7a |
| | 1 | | ctggtGTTGGAACTGCTCTCATTTT | tggttcaaag | CTCATTTTGGAGG | ssRNA | |
| | | | GGAGGGTAATCACAAC | agagctggt | GTAATCACAAC | | |
| | | | (SEQ ID. NO: 1710) | (SEQ ID. | (SEQ ID. | | |
| | | | | NO: | NO: 1712) | | |
| | | | | 1711) | | | |
| 7a | dengue_6 | CcaCas13b | acttctccctttctggttcaaagag | acttctccctt | GTTGGAACTGCT | Dengue | 7a |
| | 2 | | agctgGTTGGAACTGCTCTCATTTT | tctggttcaa | CTCATTTTGGAGG | ssRNA | |
| | | | GGAGGGTAATCACAAC | agagagctg | GTAATCACAAC | | |
| | | | (SEQ ID. NO: 1713) | (SEQ ID. | (SEQ ID. | | |
| | | | | NO: | NO: 1715) | | |
| | | | | 1714) | | | |
| 7a | dengue_6 | CcaCas13b | tgacttctccctttctggttcaaag | tgacttctcc | GTTGGAACTGCT | Dengue | 7a |
| | 3 | | agagcGTTGGAACTGCTCTCATTTT | ctttctggttc | CTCATTTTGGAGG | ssRNA | |
| | | | GGAGGGTAATCACAAC | aaagagagc | GTAATCACAAC | | |
| | | | (SEQ ID. NO: 1716) | (SEQ ID. | (SEQ ID. | | |
| | | | | NO: | NO: 1718) | | |
| | | | | 1717) | | | |
| 7a | dengue_6 | CcaCas13b | gctgacttctccctttctggttcaa | gctgacttct | GTTGGAACTGCT | Dengue | 7a |
| | 4 | | agagaGTTGGAACTGCTCTCATTTT | ccctttctggt | CTCATTTTGGAGG | ssRNA | |
| | | | GGAGGGTAATCACAAC | tcaaagaga | GTAATCACAAC | | |
| | | | (SEQ ID. NO: 1719) | (SEQ ID. | (SEQ ID. | | |
| | | | | NO: | NO: 1721) | | |
| | | | | 1720) | | | |
| 7a | dengue_6 | CcaCas13b | ggctgacttctccctttctggttca | ggctgacttc | GTTGGAACTGCT | Dengue | 7a |
| | 5 | | aagagGTTGGAACTGCTCTCATTTT | tccctttctgg | CTCATTTTGGAGG | ssRNA | |
| | | | GGAGGGTAATCACAAC | ttcaaagag | GTAATCACAAC | | |
| | | | (SEQ ID. NO: 1722) | (SEQ ID. | (SEQ ID. | | |
| | | | | NO: | NO: 1724) | | |
| | | | | 1723) | | | |
| 7a | dengue_6 | CcaCas13b | cggctgacttctccctttctggttc | cggctgactt | GTTGGAACTGCT | Dengue | 7a |
| | 6 | | aaagaGTTGGAACTGCTCTCATTTT | ctccctttctg | CTCATTTTGGAGG | ssRNA | |
| | | | GGAGGGTAATCACAAC | gttcaaaga | GTAATCACAAC | | |
| | | | (SEQ ID. NO: 1725) | (SEQ ID. | (SEQ ID. | | |
| | | | | NO: | NO: 1727) | | |
| | | | | 1726) | | | |
| 7a | dengue_6 | CcaCas13b | gcggctgacttctccctttctggtt | gcggctgac | GTTGGAACTGCT | Dengue | 7a |
| | 7 | | caaagGTTGGAACTGCTCTCATTTT | ttctccctttc | CTCATTTTGGAGG | ssRNA | |
| | | | GGAGGGTAATCACAAC | tggttcaaag | GTAATCACAAC | | |
| | | | (SEQ ID. NO: 1728) | (SEQ ID. | (SEQ ID. | | |
| | | | | NO: | NO: 1730) | | |
| | | | | 1729) | | | |
| 7a | dengue_6 | CcaCas13b | ggcggctgacttctccctttctggt | ggcggctga | GTTGGAACTGCT | Dengue | 7a |
| | 8 | | tcaaaGTTGGAACTGCTCTCATTTT | cttctcccttt | CTCATTTTGGAGG | ssRNA | |
| | | | GGAGGGTAATCACAAC | ctggttcaaa | GTAATCACAAC | | |
| | | | (SEQ ID. NO: 1731) | (SEQ ID. | (SEQ ID. | | |
| | | | | NO: | NO: 1733) | | |
| | | | | 1732) | | | |
| 7a | dengue_6 | CcaCas13b | tggcggctgacttctccctttctgg | tggcggctg | GTTGGAACTGCT | Dengue | 7a |
| | 9 | | ttcaaGTTGGAACTGCTCTCATTTT | acttctccctt | CTCATTTTGGAGG | ssRNA | |
| | | | GGAGGGTAATCACAAC | tctggttcaa | GTAATCACAAC | | |
| | | | (SEQ ID. NO: 1734) | (SEQ ID. | (SEQ ID. | | |
| | | | | NO: | NO: 1736) | | |
| | | | | 1735) | | | |
| 7a | dengue_7 | CcaCas13b | atggcggctgacttctccctttctg | atggcggct | GTTGGAACTGCT | Dengue | 7a |
| | 0 | | gttcaGTTGGAACTGCTCTCATTTT | gacttctccc | CTCATTTTGGAGG | ssRNA | |
| | | | GGAGGGTAATCACAAC | tttctggttca | GTAATCACAAC | | |
| | | | (SEQ ID. NO: 1737) | (SEQ ID. | (SEQ ID. | | |
| | | | | NO: | NO: 1739) | | |
| | | | | 1738) | | | |
| 7a | dengue_7 | CcaCas13b | tatggcggctgacttctccctttct | tatggcggct | GTTGGAACTGCT | Dengue | 7a |
| | 1 | | ggttcGTTGGAACTGCTCTCATTTT | gacttctccc | CTCATTTTGGAGG | ssRNA | |
| | | | GGAGGGTAATCACAAC | tttctggttc | GTAATCACAAC | | |
| | | | (SEQ ID. NO: 1740) | (SEQ ID. | (SEQ ID. | | |
| | | | | NO: | NO: 1742) | | |
| | | | | 1741) | | | |
| 7a | dengue_7 | CcaCas13b | ctatggcggctgacttctccctttc | ctatggcgg | GTTGGAACTGCT | Dengue | 7a |
| | 2 | | tggttGTTGGAACTGCTCTCATTTT | ctgacttctc | CTCATTTTGGAGG | ssRNA | |
| | | | GGAGGGTAATCACAAC | cctttctggtt | GTAATCACAAC | | |
| | | | (SEQ ID. NO: 1743) | (SEQ ID. | (SEQ ID. | | |
| | | | | NO: | NO: 1745) | | |
| | | | | 1744) | | | |
| 7a | dengue_7 | CcaCas13b | tctatggcggctgacttctcccttt | tctatggcgg | GTTGGAACTGCT | Dengue | 7a |
| | 3 | | ctggtGTTGGAACTGCTCTCATTTT | ctgacttctc | CTCATTTTGGAGG | ssRNA | |
| | | | GGAGGGTAATCACAAC | cctttctggt | GTAATCACAAC | | |
| | | | (SEQ ID. NO: 1746) | (SEQ ID. | (SEQ ID. | | |
| | | | | NO: | NO: 1748) | | |
| | | | | 1747) | | | |
| 7a | dengue_7 | CcaCas13b | gtctatggcggctgacttctccctt | gtctatggcg | GTTGGAACTGCT | Dengue | 7a |
| | 4 | | tctggGTTGGAACTGCTCTCATTTT | gctgacttct | CTCATTTTGGAGG | ssRNA | |
| | | | GGAGGGTAATCACAAC | ccctttctgg | GTAATCACAAC | | |
| | | | (SEQ ID. NO: 1749) | (SEQ ID. | (SEQ ID. | | |
| | | | | NO: | NO: 1751) | | |
| | | | | 1750) | | | |
| 7a | dengue_7 | CcaCas13b | cgtctatggcggctgacttctccct | cgtctatggc | GTTGGAACTGCT | Dengue | 7a |
| | 5 | | ttctgGTTGGAACTGCTCTCATTTT | ggctgacttc | CTCATTTTGGAGG | ssRNA | |
| | | | GGAGGGTAATCACAAC | tccctttctg | GTAATCACAAC | | |
| | | | (SEQ ID. NO: 1752) | (SEQ ID. | (SEQ ID. | | |
| | | | | NO: | NO: 1754) | | |
| | | | | 1753) | | | |
| 7a | dengue_7 | CcaCas13b | ccgtctatggcggctgacttctccc | ccgtctatgg | GTTGGAACTGCT | Dengue | 7a |
| | 6 | | tttctGTTGGAACTGCTCTCATTTT | cggctgactt | CTCATTTTGGAGG | ssRNA | |
| | | | GGAGGGTAATCACAAC | ctccctttct | GTAATCACAAC | | |
| | | | (SEQ ID. NO: 1755) | (SEQ ID. | (SEQ ID. | | |
| | | | | NO: | NO: 1757) | | |
| | | | | 1756) | | | |
| 7a | dengue_7 | CcaCas13b | accgtctatggcggctgacttctcc | accgtctatg | GTTGGAACTGCT | Dengue | 7a |
| | 7 | | ctttcGTTGGAACTGCTCTCATTTT | gcggctgac | CTCATTTTGGAGG | ssRNA | |
| | | | GGAGGGTAATCACAAC | ttctccctttc | GTAATCACAAC | | |
| | | | (SEQ ID. NO: 1758) | (SEQ ID. | (SEQ ID. | | |
| | | | | NO: | NO: 1760) | | |
| | | | | 1759) | | | |
| 7a | dengue_7 | CcaCas3b | caccgtctatggcggctgacttctc | caccgtctat | GTTGGAACTGCT | Dengue | 7a |
| | 8 | | cctttGTTGGAACTGCTCTCATTTT | ggcggctga | CTCATTTTGGAGG | ssRNA | |
| | | | GGAGGGTAATCACAAC | cttctcccttt | GTAATCACAAC | | |
| | | | (SEQ ID. NO: 1761) | (SEQ ID. | (SEQ ID. | | |
| | | | | NO: | NO: 1763) | | |
| | | | | 1762) | | | |
| 7a | dengue_7 | CcaCas13b | tcaccgtctatggcggctgacttct | tcaccgtcta | GTTGGAACTGCT | Dengue | 7a |
| | 9 | | cccttGTTGGAACTGCTCTCATTTT | tggcggctg | CTCATTTTGGAGG | ssRNA | |
| | | | GGAGGGTAATCACAAC | acttctccctt | GTAATCACAAC | | |
| | | | (SEQ ID. NO: 1764) | (SEQ ID. | (SEQ ID. | | |
| | | | | NO: | NO: 1766) | | |
| | | | | 1765) | | | |
| 7a | dengue_8 | CcaCas13b | ttcaccgtctatggcggctgacttc | ttcaccgtct | GTTGGAACTGCT | Dengue | 7a |
| | 0 | | tccctGTTGGAACTGCTCTCATTTT | atggcggct | CTCATTTTGGAGG | ssRNA | |
| | | | GGAGGGTAATCACAAC | gacttctccc | GTAATCACAAC | | |
| | | | (SEQ ID. NO: 1767) | t (SEQ | (SEQ ID. | | |
| | | | | ID. NO: | NO: 1769) | | |
| | | | | 1768) | | | |
| 7a | dengue_8 | CcaCas13b | attcaccgtctatggcggctgactt | attcaccgtc | GTTGGAACTGCT | Dengue | 7a |
| | 1 | | ctcccGTTGGAACTGCTCTCATTTT | tatggcggct | CTCATTTTGGAGG | ssRNA | |
| | | | GGAGGGTAATCACAAC | gacttctccc | GTAATCACAAC | | |
| | | | (SEQ ID. NO: 1770) | (SEQ ID. | (SEQ ID. | | |
| | | | | NO: | NO: 1772) | | |
| | | | | 1771) | | | |
| 7a | dengue_8 | CcaCas13b | tattcaccgtctatggcggctgact | tattcaccgt | GTTGGAACTGCT | Dengue | 7a |
| | 2 | | tctccGTTGGAACTGCTCTCATTTT | ctatggcgg | CTCATTTTGGAGG | ssRNA | |
| | | | GGAGGGTAATCACAAC | ctgacttctc | GTAATCACAAC | | |
| | | | (SEQ ID. NO: 1773) | c (SEQ | (SEQ ID. | | |
| | | | | ID. NO: | NO: 1775) | | |
| | | | | 1774) | | | |
| 7a | dengue_8 | CcaCas13b | gtattcaccgtctatggcggctgac | gtattcaccg | GTTGGAACTGCT | Dengue | 7a |
| | 3 | | ttctcGTTGGAACTGCTCTCATTTT | tctatggcgg | CTCATTTTGGAGG | ssRNA | |
| | | | GGAGGGTAATCACAAC | ctgacttctc | GTAATCACAAC | | |
| | | | (SEQ ID. NO: 1776) | (SEQ ID. | (SEQ ID. | | |
| | | | | NO: | NO: 1778) | | |
| | | | | 1777) | | | |
| 7a | dengue_8 | CcaCas13b | ggtattcaccgtctatggcggctga | ggtattcacc | GTTGGAACTGCT | Dengue | 7a |
| | 4 | | cttctGTTGGAACTGCTCTCATTTT | gtctatggcg | CTCATTTTGGAGG | ssRNA | |
| | | | GGAGGGTAATCACAAC | gctgacttct | GTAATCACAAC | | |
| | | | (SEQ ID. NO: 1779) | (SEQ ID. | (SEQ ID. | | |
| | | | | NO: | NO: 1781) | | |
| | | | | 1780) | | | |
| 7a | dengue_8 | CcaCas13b | cggtattcaccgtctatggcggctg | cggtattcac | GTTGGAACTGCT | Dengue | 7a |
| | 5 | | acttcGTTGGAACTGCTCTCATTTT | cgtctatggc | CTCATTTTGGAGG | ssRNA | |
| | | | GGAGGGTAATCACAAC | ggctgacttc | GTAATCACAAC | | |
| | | | (SEQ ID. NO: 1782) | (SEQ ID. | (SEQ ID. | | |
| | | | | NO: | NO: 1784) | | |
| | | | | 1783) | | | |
| 7a | dengue_8 | CcaCas13b | gcggtattcaccgtctatggcggct | gcggtattca | GTTGGAACTGCT | Dengue | 7a |
| | 6 | | gacttGTTGGAACTGCTCTCATTTT | ccgtctatgg | CTCATTTTGGAGG | ssRNA | |
| | | | GGAGGGTAATCACAAC | cggctgactt | GTAATCACAAC | | |
| | | | (SEQ ID. NO: 1785) | (SEQ ID. | (SEQ ID. | | |
| | | | | NO: | NO: 1787) | | |
| | | | | 1786) | | | |
| 7a | dengue_8 | CcaCas13b | ggcggtattcaccgtctatggcggc | ggcggtattc | GTTGGAACTGCT | Dengue | 7a |
| | 7 | | tgactGTTGGAACTGCTCTCATTT | accgtctatg | CTCATTTTGGAGG | ssRNA | |
| | | | TGGAGGGTAATCACAAC | gcggctgac | GTAATCACAAC | | |
| | | | (SEQ ID. NO: 1788) | t (SEQ | (SEQ ID. | | |
| | | | | ID. NO: | NO: 1790) | | |
| | | | | 1789) | | | |
| 7a | dengue_8 | CcaCas13b | aggcggtattcaccgtctatggcgg | aggcggtatt | GTTGGAACTGCT | Dengue | 7a |
| | 8 | | ctgacGTTGGAACTGCTCTCATTT | caccgtctat | CTCATTTTGGAGG | ssRNA | |
| | | | TGGAGGGTAATCACAAC | ggcggctga | GTAATCACAAC | | |
| | | | (SEQ ID. NO: 1791) | c (SEQ | (SEQ ID. | | |
| | | | | ID. NO: | NO: 1793) | | |
| | | | | 1792) | | | |
| 7a | dengue_8 | CcaCas13b | caggcggtattcaccgtctatggcg | caggcggta | GTTGGAACTGCT | Dengue | 7a |
| | 9 | | gctgaGTTGGAACTGCTCTCATTTT | ttcaccgtct | CTCATTTTGGAGG | ssRNA | |
| | | | GGAGGGTAATCACAAC | atggcggct | GTAATCACAAC | | |
| | | | (SEQ ID. NO: 1794) | ga (SEQ | (SEQ ID. | | |
| | | | | ID. NO: | NO: 1796) | | |
| | | | | 1795) | | | |
| 7a | dengue_9 | CcaCas13b | tcaggcggtattcaccgtctatggc | tcaggcggt | GTTGGAACTGCT | Dengue | 7a |
| | 0 | | ggctgGTTGGAACTGCTCTCATTTT | attcaccgtc | CTCATTTTGGAGG | ssRNA | |
| | | | GGAGGGTAATCACAAC | tatggcggct | GTAATCACAAC | | |
| | | | (SEQ ID. NO: 1797) | g (SEQ | (SEQ ID. | | |
| | | | | ID. NO: | NO: 1799) | | |
| | | | | 1798) | | | |
| 7a | dengue_9 | CcaCas13b | ttcaggcggtattcaccgtctatgg | ttcaggcggt | GTTGGAACTGCT | Dengue | 7a |
| | 1 | | cggctGTTGGAACTGCTCTCATTTT | attcaccgtc | CTCATTTTGGAGG | ssRNA | |
| | | | GGAGGGTAATCACAAC | tatggcggct | GTAATCACAAC | | |
| | | | (SEQ ID. NO: 1800) | (SEQ ID. | (SEQ ID. | | |
| | | | | NO: | NO: 1802) | | |
| | | | | 1801) | | | |
| 7a | dengue_9 | CcaCas13b | cttcaggcggtattcaccgtctatg | cttcaggcg | GTTGGAACTGCT | Dengue | 7a |
| | 2 | | gcggcGTTGGAACTGCTCTCATTTT | gtattcaccg | CTCATTTTGGAGG | ssRNA | |
| | | | GGAGGGTAATCACAAC | tctatggcgg | GTAATCACAAC | | |
| | | | (SEQ ID. NO: 1803) | c (SEQ | (SEQ ID. | | |
| | | | | ID. NO: | NO: 1805) | | |
| | | | | 1804) | | | |
| 7a | dengue_9 | CcaCas13b | ccttcaggcggtattcaccgtctat | ccttcaggc | GTTGGAACTGCT | Dengue | 7a |
| | 3 | | ggcggGTTGGAACTGCTCTCATTTT | ggtattcacc | CTCATTTTGGAGG | ssRNA | |
| | | | GGAGGGTAATCACAAC | gtctatggcg | GTAATCACAAC | | |
| | | | (SEQ ID. NO: 1806) | g (SEQ | (SEQ ID. | | |
| | | | | ID. NO: | NO: 1808) | | |
| | | | | 1807) | | | |
| 7a | dengue_9 | CcaCas13b | cccttcaggcggtattcaccgtcta | cccttcaggc | GTTGGAACTGCT | Dengue | 7a |
| | 4 | | tggcgGTTGGAACTGCTCTCATTTT | ggtattcacc | CTCATTTTGGAGG | ssRNA | |
| | | | GGAGGGTAATCACAAC | gtctatggcg | GTAATCACAAC | | |
| | | | (SEQ ID. NO: 1809) | (SEQ ID. | (SEQ ID. | | |
| | | | | NO: | NO: 1811) | | |
| | | | | 1810) | | | |
| 7a | thermo_0 | CcaCas13b | attaatttaacagtatcaccatcaa | attaatttaac | GTTGGAACTGCT | Ther- | 7a |
| | | | tcgctGTTGGAACTGCTCTCATTTT | agtatcacca | CTCATTTTGGAGG | mo- | |
| | | | GGAGGGTAATCACAAC | tcaatcgct | GTAATCACAAC | nu- | |
| | | | (SEQ ID. NO: 1812) | (SEQ ID. | (SEQ ID. | clease | |
| | | | | NO: | NO: 1814) | | |
| | | | | 1813) | | | |
| 7a | thermo_1 | CcaCas13b | cattaatttaacagtatcaccatca | cattaatttaa | GTTGGAACTGCT | Ther- | 7a |
| | | | atcgcGTTGGAACTGCTCTCATTTT | cagtatcacc | CTCATTTTGGAGG | mo- | |
| | | | GGAGGGTAATCACAAC | atcaatcgc | GTAATCACAAC | nu- | |
| | | | (SEQ ID. NO: 1815) | (SEQ ID. | (SEQ ID. | clease | |
| | | | | NO: | NO: 1817) | | |
| | | | | 1816) | | | |
| 7a | thermo_2 | CcaCas13b | acattaatttaacagtatcaccatc | acattaattta | GTTGGAACTGCT | Ther- | 7a |
| | | | aatcgGTTGGAACTGCTCTCATTTT | acagtatcac | CTCATTTTGGAGG | mo- | |
| | | | GGAGGGTAATCACAAC | catcaatcg | GTAATCACAAC | nu- | |
| | | | (SEQ ID. NO: 1818) | (SEQ ID. | (SEQ ID. | clease | |
| | | | | NO: | NO: 1820) | | |
| | | | | 1819) | | | |
| 7a | thermo_3 | CcaCas13b | tacattaatttaacagtatcaccat | tacattaattt | GTTGGAACTGCT | Ther- | 7a |
| | | | caatcGTTGGAACTGCTCTCATTTT | aacagtatca | CTCATTTTGGAGG | mo- | |
| | | | GGAGGGTAATCACAAC | ccatcaatc | GTAATCACAAC | nu- | |
| | | | (SEQ ID. NO: 1821) | (SEQ ID. | (SEQ ID. | clease | |
| | | | | NO: | NO: 1823) | | |
| | | | | 1822) | | | |
| 7a | thermo_4 | CcaCas13b | gtacattaatttaacagtatcacca | gtacattaatt | GTTGGAACTGCT | Ther- | 7a |
| | | | tcaatGTTGGAACTGCTCTCATTTT | taacagtatc | CTCATTTTGGAGG | mo- | |
| | | | GGAGGGTAATCACAAC | accatcaat | GTAATCACAAC | nu- | |
| | | | (SEQ ID. NO: 1824) | (SEQ ID. | (SEQ ID. | clease | |
| | | | | NO: | NO: 1826) | | |
| | | | | 1825) | | | |
| 7a | thermo_5 | CcaCas13b | tgtacattaatttaacagtatcacc | tgtacattaat | GTTGGAACTGCT | Ther- | 7a |
| | | | atcaaGTTGGAACTGCTCTCATTTT | ttaacagtat | CTCATTTTGGAGG | mo- | |
| | | | GGAGGGTAATCACAAC | caccatcaa | GTAATCACAAC | nu- | |
| | | | (SEQ ID. NO: 1827) | (SEQ ID. | (SEQ ID. | clease | |
| | | | | NO: | NO: 1829) | | |
| | | | | 1828) | | | |
| 7a | thermo_6 | CcaCas13b | ttgtacattaatttaacagtatcac | ttgtacattaa | GTTGGAACTGCT | Ther- | 7a |
| | | | catcaGTTGGAACTGCTCTCATTTT | tttaacagtat | CTCATTTTGGAGG | mo- | |
| | | | GGAGGGTAATCACAAC | caccatca | GTAATCACAAC | nu- | |
| | | | (SEQ ID. NO: 1830) | (SEQ ID. | (SEQ ID. | clease | |
| | | | | NO: | NO: 1832) | | |
| | | | | 1831) | | | |
| 7a | thermo_7 | CcaCas13b | tttgtacattaatttaacagtatca | tttgtacatta | GTTGGAACTGCT | Ther- | 7a |
| | | | ccatcGTTGGAACTGCTCTCATTTT | atttaacagt | CTCATTTTGGAGG | mo- | |
| | | | GGAGGGTAATCACAAC | atcaccatc | GTAATCACAAC | nu- | |
| | | | (SEQ ID. NO: 1833) | (SEQ ID. | (SEQ ID. | clease | |
| | | | | NO: | NO: 1835) | | |
| | | | | 1834) | | | |
| 7a | thermo_8 | CcaCas13b | ctttgtacattaatttaacagtatc | ctttgtacatt | GTTGGAACTGCT | Ther- | 7a |
| | | | accatGTTGGAACTGCTCTCATTTT | aatttaacag | CTCATTTTGGAGG | mo- | |
| | | | GGAGGGTAATCACAAC | tatcaccat | GTAATCACAAC | nu- | |
| | | | (SEQ ID. NO: 1836) | (SEQ ID. | (SEQ ID. | clease | |
| | | | | NO: | NO: 1838) | | |
| | | | | 1837) | | | |
| 7a | thermo_9 | CcaCas13b | cctttgtacattaatttaacagtat | cctttgtacat | GTTGGAACTGCT | Ther- | 7a |
| | | | caccaGTTGGAACTGCTCTCATTTT | taatttaaca | CTCATTTTGGAGG | mo- | |
| | | | GGAGGGTAATCACAAC | gtatcacca | GTAATCACAAC | nu- | |
| | | | (SEQ ID. NO: 1839) | (SEQ ID. | (SEQ ID. | clease | |
| | | | | NO: | NO: 1841) | | |
| | | | | 1840) | | | |
| 7a | thermo_1 | CcaCas13b | acctttgtacattaatttaacagta | acctttgtac | GTTGGAACTGCT | Ther- | 7a |
| | 0 | | tcaccGTTGGAACTGCTCTCATTTT | attaatttaac | CTCATTTTGGAGG | mo- | |
| | | | GGAGGGTAATCACAAC | agtatcacc | GTAATCACAAC | nu- | |
| | | | (SEQ ID. NO: 1842) | (SEQ ID. | (SEQ ID. | clease | |
| | | | | NO: | NO: 1844) | | |
| | | | | 1843) | | | |
| 7a | thermo_1 | CcaCas13b | gacctttgtacattaatttaacagt | gacctttgta | GTTGGAACTGCT | Ther- | 7a |
| | 1 | | atcacGTTGGAACTGCTCTCATTTT | cattaatttaa | CTCATTTTGGAGG | mo- | |
| | | | GGAGGGTAATCACAAC | cagtatcac | GTAATCACAAC | nu- | |
| | | | (SEQ ID. NO: 1845) | (SEQ ID. | (SEQ ID. | clease | |
| | | | | NO: | NO: 1847) | | |
| | | | | 1846) | | | |
| 7a | thermo_1 | CcaCas13b | tgacctttgtacattaatttaacag | tgacctttgta | GTTGGAACTGCT | Ther- | 7a |
| | 2 | | tatcaGTTGGAACTGCTCTCATTTT | cattaatttaa | CTCATTTTGGAGG | mo- | |
| | | | GGAGGGTAATCACAAC | cagtatca | GTAATCACAAC | nu- | |
| | | | (SEQ ID. NO: 1848) | (SEQ ID. | (SEQ ID. | clease | |
| | | | | NO: | NO: 1850) | | |
| | | | | 1849) | | | |
| 7a | thermo_1 | CcaCas13b | ttgacctttgtacattaatttaaca | ttgacctttgt | GTTGGAACTGCT | Ther- | 7a |
| | 3 | | gtatcGTTGGAACTGCTCTCATTTT | acattaattta | CTCATTTTGGAGG | mo- | |
| | | | GGAGGGTAATCACAAC | acagtatc | GTAATCACAAC | nu- | |
| | | | (SEQ ID. NO: 1851) | (SEQ ID. | (SEQ ID. | clease | |
| | | | | NO: | NO: 1853) | | |
| | | | | 1852) | | | |
| 7a | thermo_1 | CcaCas13b | gttgacctttgtacattaatttaac | gttgacctttg | GTTGGAACTGCT | Ther- | 7a |
| | 4 | | agtatGTTGGAACTGCTCTCATTTT | tacattaattt | CTCATTTTGGAGG | mo- | |
| | | | GGAGGGTAATCACAAC | aacagtat | GTAATCACAAC | nu- | |
| | | | (SEQ ID. NO: 1854) | (SEQ ID. | (SEQ ID. | clease | |
| | | | | NO: | NO: 1856) | | |
| | | | | 1855) | | | |
| 7a | thermo_1 | CcaCas13b | ggttgacctttgtacattaatttaa | ggttgaccttt | GTTGGAACTGCT | Ther- | 7a |
| | 5 | | cagtaGTTGGAACTGCTCTCATTTT | gtacattaatt | CTCATTTTGGAGG | mo- | |
| | | | GGAGGGTAATCACAAC | taacagta | GTAATCACAAC | nu- | |
| | | | (SEQ ID. NO: 1857) | (SEQ ID. | (SEQ ID. | clease | |
| | | | | NO: | NO: 1859) | | |
| | | | | 1858) | | | |
| 7a | thermo_1 | CcaCas13b | tggttgacctttgtacattaattta | tggttgacctt | GTTGGAACTGCT | Ther- | 7a |
| | 6 | | acagtGTTGGAACTGCTCTCATTTT | tgtacattaat | CTCATTTTGGAGG | mo- | |
| | | | GGAGGGTAATCACAAC | ttaacagt | GTAATCACAAC | nu- | |
| | | | (SEQ ID. NO: 1860) | (SEQ ID. | (SEQ ID. | clease | |
| | | | | NO: | NO: 1862) | | |
| | | | | 1861) | | | |
| 7a | thermo_1 | CcaCas13b | ttggttgacctttgtacattaattt | ttggttgacct | GTTGGAACTGCT | Ther- | 7a |
| | 7 | | aacagGTTGGAACTGCTCTCATTTT | ttgtacattaa | CTCATTTTGGAGG | mo- | |
| | | | GGAGGGTAATCACAAC | tttaacag | GTAATCACAAC | nu- | |
| | | | (SEQ ID. NO: 1863) | (SEQ ID. | (SEQ ID. | clease | |
| | | | | NO: | NO: 1865) | | |
| | | | | 1864) | | | |
| 7a | thermo_1 | CcaCas13b | attggttgacctttgtacattaatt | attggttgac | GTTGGAACTGCT | Ther- | 7a |
| | 8 | | taacaGTTGGAACTGCTCTCATTTT | ctttgtacatt | CTCATTTTGGAGG | mo- | |
| | | | GGAGGGTAATCACAAC | aatttaaca | GTAATCACAAC | nu- | |
| | | | (SEQ ID. NO: 1866) | (SEQ ID. | (SEQ ID. | clease | |
| | | | | NO: | NO: 1868) | | |
| | | | | 1867) | | | |
| 7a | thermo_1 | CcaCas13b | cattggttgacctttgtacattaat | cattggttga | GTTGGAACTGCT | Ther- | 7a |
| | 9 | | ttaacGTTGGAACTGCTCTCATTTT | cctttgtacat | CTCATTTTGGAGG | mo- | |
| | | | GGAGGGTAATCACAAC | taatttaac | GTAATCACAAC | nu- | |
| | | | (SEQ ID. NO: 1869) | (SEQ ID. | (SEQ ID. | clease | |
| | | | | NO: | NO: 1871) | | |
| | | | | 1870) | | | |
| 7a | thermo_2 | CcaCas13b | gtcattggttgacctttgtacatta | gtcattggtt | GTTGGAACTGCT | Ther- | 7a |
| | 0 | | atttaGTTGGAACTGCTCTCATTTT | gacctttgta | CTCATTTTGGAGG | mo- | |
| | | | GGAGGGTAATCACAAC | cattaattta | GTAATCACAAC | nu- | |
| | | | (SEQ ID. NO: 1872) | (SEQ ID. | (SEQ ID. | clease | |
| | | | | NO: | NO: 1874) | | |
| | | | | 1873) | | | |
| 7a | thermo_2 | CcaCas13b | atgtcattggttgacctttgtacat | atgtcattggt | GTTGGAACTGCT | Ther- | 7a |
| | 1 | | taattGTTGGAACTGCTCTCATTTT | tgacctttgta | CTCATTTTGGAGG | mo- | |
| | | | GGAGGGTAATCACAAC | cattaatt | GTAATCACAAC | nu- | |
| | | | (SEQ ID. NO: 1875) | (SEQ ID. | (SEQ ID. | clease | |
| | | | | NO: | NO: 1877) | | |
| | | | | 1876) | | | |
| 7a | thermo_2 | CcaCas13b | gaatgtcattggttgacctttgtac | gaatgtcatt | GTTGGAACTGCT | Ther- | 7a |
| | 2 | | attaaGTTGGAACTGCTCTCATTTT | ggttgaccttt | CTCATTTTGGAGG | mo- | |
| | | | GGAGGGTAATCACAAC | gtacattaa | GTAATCACAAC | nu- | |
| | | | (SEQ ID. NO: 1878) | (SEQ ID. | (SEQ ID. | clease | |
| | | | | NO: | NO: 1880) | | |
| | | | | 1879) | | | |
| 7a | thermo_2 | CcaCas13b | ctgaatgtcattggttgacctttgt | ctgaatgtca | GTTGGAACTGCT | Ther- | 7a |
| | 3 | | acattGTTGGAACTGCTCTCATTTT | ttggttgacct | CTCATTTTGGAGG | mo- | |
| | | | GGAGGGTAATCACAAC | ttgtacatt | GTAATCACAAC | nu- | |
| | | | (SEQ ID. NO: 1881) | (SEQ ID. | (SEQ ID. | clease | |
| | | | | NO: | NO: 1883) | | |
| | | | | 1882) | | | |
| 7a | thermo_2 | CcaCas13b | gtctgaatgtcattggttgaccttt | gtctgaatgt | GTTGGAACTGCT | Ther- | 7a |
| | 4 | | gtacaGTTGGAACTGCTCTCATTTT | cattggttga | CTCATTTTGGAGG | mo- | |
| | | | GGAGGGTAATCACAAC | cctttgtaca | GTAATCACAAC | nu- | |
| | | | (SEQ ID. NO: 1884) | (SEQ ID. | (SEQ ID. | clease | |
| | | | | NO: | NO: 1886) | | |
| | | | | 1885) | | | |
| 7a | thermo_2 | CcaCas13b | tagtctgaatgtcattggttgacct | tagtctgaat | GTTGGAACTGCT | Ther- | 7a |
| | 5 | | ttgtaGTTGGAACTGCTCTCATTTT | gtcattggtt | CTCATTTTGGAGG | mo- | |
| | | | GGAGGGTAATCACAAC | gacctttgta | GTAATCACAAC | nu- | |
| | | | (SEQ ID. NO: 1887) | (SEQ ID. | (SEQ ID. | clease | |
| | | | | NO: | NO: 1889) | | |
| | | | | 1888) | | | |
| 7a | thermo_2 | CcaCas13b | aatagtctgaatgtcattggttgac | aatagtctga | GTTGGAACTGCT | Ther- | 7a |
| | 6 | | ctttgGTTGGAACTGCTCTCATTTT | atgtcattggt | CTCATTTTGGAGG | mo- | |
| | | | GGAGGGTAATCACAAC | tgacctttg | GTAATCACAAC | nu- | |
| | | | (SEQ ID. NO: 1890) | (SEQ ID. | (SEQ ID. | clease | |
| | | | | NO: | NO: 1892) | | |
| | | | | 1891) | | | |
| 7a | thermo_2 | CcaCas13b | ataatagtctgaatgtcattggttg | ataatagtct | GTTGGAACTGCT | Ther- | 7a |
| | 7 | | accttGTTGGAACTGCTCTCATTTT | gaatgtcatt | CTCATTTTGGAGG | mo- | |
| | | | GGAGGGTAATCACAAC | ggttgacctt | GTAATCACAAC | nu- | |
| | | | (SEQ ID. NO: 1893) | (SEQ ID. | (SEQ ID. | clease | |
| | | | | NO: | NO: 1895) | | |
| | | | | 1894) | | | |
| 7a | thermo_2 | CcaCas13b | caataatagtctgaatgtcattggt | caataatagt | GTTGGAACTGCT | Ther- | 7a |
| | 8 | | tgaccGTTGGAACTGCTCTCATTTT | ctgaatgtca | CTCATTTTGGAGG | mo- | |
| | | | GGAGGGTAATCACAAC | ttggttgacc | GTAATCACAAC | nu- | |
| | | | (SEQ ID. NO: 1896) | (SEQ ID. | (SEQ ID. | clease | |
| | | | | NO: | NO: 1898) | | |
| | | | | 1897) | | | |
| 7a | thermo_2 | CcaCas13b | accaataatagtctgaatgtcattg | accaataata | GTTGGAACTGCT | Ther- | 7a |
| | 9 | | gttgaGTTGGAACTGCTCTCATTTT | gtctgaatgt | CTCATTTTGGAGG | mo- | |
| | | | GGAGGGTAATCACAAC | cattggttga | GTAATCACAAC | nu- | |
| | | | (SEQ ID. NO: 1899) | (SEQ ID. | (SEQ ID. | clease | |
| | | | | NO: | NO: 1901) | | |
| | | | | 1900) | | | |
| 7a | thermo_3 | CcaCas13b | caaccaataatagtctgaatgtcat | caaccaata | GTTGGAACTGCT | Ther- | 7a |
| | 0 | | tggttGTTGGAACTGCTCTCATTTT | atagtctgaa | CTCATTTTGGAGG | mo- | |
| | | | GGAGGGTAATCACAAC | tgtcattggtt | GTAATCACAAC | nu- | |
| | | | (SEQ ID. NO: 1902) | (SEQ ID. | (SEQ ID. | clease | |
| | | | | NO: | NO: 1904) | | |
| | | | | 1903) | | | |
| 7a | thermo_3 | CcaCas13b | atcaaccaataatagtctgaatgtc | atcaaccaat | GTTGGAACTGCT | Ther- | 7a |
| | 1 | | attggGTTGGAACTGCTCTCATTTT | aatagtctga | CTCATTTTGGAGG | mo- | |
| | | | GGAGGGTAATCACAAC | atgtcattgg | GTAATCACAAC | nu- | |
| | | | (SEQ ID. NO: 1905) | (SEQ ID. | (SEQ ID. | clease | |
| | | | | NO: | NO: 1907) | | |
| | | | | 1906) | | | |
| 7a | thermo_3 | CcaCas13b | gtatcaaccaataatagtctgaatg | gtatcaacca | GTTGGAACTGCT | Ther- | 7a |
| | 2 | | tcattGTTGGAACTGCTCTCATTTT | ataatagtct | CTCATTTTGGAGG | mo- | |
| | | | GGAGGGTAATCACAAC | gaatgtcatt | GTAATCACAAC | nu- | |
| | | | (SEQ ID. NO: 1908) | (SEQ ID. | (SEQ ID. | clease | |
| | | | | NO: | NO: 1910) | | |
| | | | | 1909) | | | |
| 7a | thermo_3 | CcaCas13b | gtgtatcaaccaataatagtctgaa | gtgtatcaac | GTTGGAACTGCT | Ther- | 7a |
| | 3 | | tgtcaGTTGGAACTGCTCTCATTTT | caataatagt | CTCATTTTGGAGG | mo- | |
| | | | GGAGGGTAATCACAAC | ctgaatgtca | GTAATCACAAC | nu- | |
| | | | (SEQ ID. NO: 1911) | (SEQ ID. | (SEQ ID. | clease | |
| | | | | NO: | NO: 1913) | | |
| | | | | 1912) | | | |
| 7a | thermo_3 | CcaCas13b | aggtgtatcaaccaataatagtctg | aggtgtatca | GTTGGAACTGCT | Ther- | 7a |
| | 4 | | aatgtGTTGGAACTGCTCTCATTTT | accaataata | CTCATTTTGGAGG | mo- | |
| | | | GGAGGGTAATCACAAC | gtctgaatgt | GTAATCACAAC | nu- | |
| | | | (SEQ ID. NO: 1914) | (SEQ ID. | (SEQ ID. | clease | |
| | | | | NO: | NO: 1916) | | |
| | | | | 1915) | | | |
| 7a | thermo_3 | CcaCas13b | tcaggtgtatcaaccaataatagtc | tcaggtgtat | GTTGGAACTGCT | Ther- | 7a |
| | 5 | | tgaatGTTGGAACTGCTCTCATTTT | caaccaata | CTCATTTTGGAGG | mo- | |
| | | | GGAGGGTAATCACAAC | atagtctgaa | GTAATCACAAC | nu- | |
| | | | (SEQ ID. NO: 1917) | t (SEQ | (SEQ ID. | clease | |
| | | | | ID. NO: | NO: 1919) | | |
| | | | | 1918) | | | |
| 7a | thermo_3 | CcaCas13b | tttcaggtgtatcaaccaataatag | tttcaggtgta | GTTGGAACTGCT | Ther- | 7a |
| | 6 | | tctgaGTTGGAACTGCTCTCATTTT | tcaaccaata | CTCATTTTGGAGG | mo- | |
| | | | GGAGGGTAATCACAAC | atagtctga | GTAATCACAAC | nu- | |
| | | | (SEQ ID. NO: 1920) | (SEQ ID. | (SEQ ID. | clease | |
| | | | | NO: | NO: 1922) | | |
| | | | | 1921) | | | |
| 7a | thermo_3 | CcaCas13b | tgtttcaggtgtatcaaccaataat | tgtttcaggt | GTTGGAACTGCT | Ther- | 7a |
| | 7 | | agtctGTTGGAACTGCTCTCATTTT | gtatcaacca | CTCATTTTGGAGG | mo- | |
| | | | GGAGGGTAATCACAAC | ataatagtct | GTAATCACAAC | nu- | |
| | | | (SEQ ID. NO: 1923) | (SEQ ID. | (SEQ ID. | clease | |
| | | | | NO: | NO: 1925) | | |
| | | | | 1924) | | | |
| 7a | thermo_3 | CcaCas13b | tttgtttcaggtgtatcaaccaata | tttgtttcagg | GTTGGAACTGCT | Ther- | 7a |
| | 8 | | atagtGTTGGAACTGCTCTCATTTT | tgtatcaacc | CTCATTTTGGAGG | mo- | |
| | | | GGAGGGTAATCACAAC | aataatagt | GTAATCACAAC | nu- | |
| | | | (SEQ ID. NO: 1926) | (SEQ ID. | (SEQ ID. | clease | |
| | | | | NO: | NO: 1928) | | |
| | | | | 1927) | | | |
| 7a | thermo_3 | CcaCas13b | gctttgtttcaggtgtatcaaccaa | gctttgtttca | GTTGGAACTGCT | Ther- | 7a |
| | 9 | | taataGTTGGAACTGCTCTCATTTT | ggtgtatcaa | CTCATTTTGGAGG | mo- | |
| | | | GGAGGGTAATCACAAC | ccaataata | GTAATCACAAC | nu- | |
| | | | (SEQ ID. NO: 1929) | (SEQ ID. | (SEQ ID. | clease | |
| | | | | NO: | NO: 1931) | | |
| | | | | 1930) | | | |
| 7a | thermo_4 | CcaCas13b | atgctttgtttcaggtgtatcaacc | atgctttgttt | GTTGGAACTGCT | Ther- | 7a |
| | 0 | | aataaGTTGGAACTGCTCTCATTTT | caggtgtatc | CTCATTTTGGAGG | mo- | |
| | | | GGAGGGTAATCACAAC | aaccaataa | GTAATCACAAC | nu- | |
| | | | (SEQ ID. NO: 1932) | (SEQ ID. | (SEQ ID. | clease | |
| | | | | NO: | NO: 1934) | | |
| | | | | 1933) | | | |
| 7a | thermo_4 | CcaCas13b | ggatgctttgtttcaggtgtatcaa | ggatgctttg | GTTGGAACTGCT | Ther- | 7a |
| | 1 | | ccaatGTTGGAACTGCTCTCATTTT | tttcaggtgta | CTCATTTTGGAGG | mo- | |
| | | | GGAGGGTAATCACAAC | tcaaccaat | GTAATCACAAC | nu- | |
| | | | (SEQ ID. NO: 1935) | (SEQ ID. | (SEQ ID. | clease | |
| | | | | NO: | NO: 1937) | | |
| | | | | 1936) | | | |
| 7a | thermo_4 | CcaCas13b | taggatgctttgtttcaggtgtatc | taggatgcttt | GTTGGAACTGCT | Ther- | 7a |
| | 2 | | aaccaGTTGGAACTGCTCTCATTTT | gtttcaggtg | CTCATTTTGGAGG | mo- | |
| | | | GGAGGGTAATCACAAC | tatcaacca | GTAATCACAAC | nu- | |
| | | | (SEQ ID. NO: 1938) | (SEQ ID. | (SEQ ID. | clease | |
| | | | | NO: | NO: 1940) | | |
| | | | | 1939) | | | |
| 7a | thermo_4 | CcaCas13b | tttaggatgctttgtttcaggtgta | tttaggatgct | GTTGGAACTGCT | Ther- | 7a |
| | 3 | | tcaacGTTGGAACTGCTCTCATTTT | ttgtttcaggt | CTCATTTTGGAGG | mo- | |
| | | | GGAGGGTAATCACAAC | gtatcaac | GTAATCACAAC | nu- | |
| | | | (SEQ ID. NO: 1941) | (SEQ ID. | (SEQ ID. | clease | |
| | | | | NO: | NO: 1943) | | |
| | | | | 1942) | | | |
| 7a | thermo_4 | CcaCas13b | tttttaggatgctttgtttcaggtg | tttttaggatg | GTTGGAACTGCT | Ther- | 7a |
| | 4 | | tatcaGTTGGAACTGCTCTCATTTT | ctttgtttcag | CTCATTTTGGAGG | mo- | |
| | | | GGAGGGTAATCACAAC | gtgtatca | GTAATCACAAC | nu- | |
| | | | (SEQ ID. NO: 1944) | (SEQ ID. | (SEQ ID. | clease | |
| | | | | NO: | NO: 1946) | | |
| | | | | 1945) | | | |
| 7a | thermo_4 | CcaCas13b | cttttttaggatgctttgtttcagg | cttttttagga | GTTGGAACTGCT | Ther- | 7a |
| | 5 | | tgtatGTTGGAACTGCTCTCATTTT | tgctttgtttc | CTCATTTTGGAGG | mo- | |
| | | | GGAGGGTAATCACAAC | aggtgtat | GTAATCACAAC | nu- | |
| | | | (SEQ ID. NO: 1947) | (SEQ ID. | (SEQ ID. | clease | |
| | | | | NO: | NO: 1949) | | |
| | | | | 1948) | | | |
| 7a | thermo_4 | CcaCas13b | accttttttaggatgctttgtttca | accttttttag | GTTGGAACTGCT | Ther- | 7a |
| | 6 | | ggtgtGTTGGAACTGCTCTCATTTT | gatgctttgtt | CTCATTTTGGAGG | mo- | |
| | | | GGAGGGTAATCACAAC | tcaggtgt | GTAATCACAAC | nu- | |
| | | | (SEQ ID. NO: 1950) | (SEQ ID. | (SEQ ID. | clease | |
| | | | | NO: | NO: 1952) | | |
| | | | | 1951) | | | |
| 7a | thermo_4 | CcaCas13b | acaccttttttaggatgctttgttt | acacctttttt | GTTGGAACTGCT | Ther- | 7a |
| | 7 | | caggtGTTGGAACTGCTCTCATTTT | aggatgcttt | CTCATTTTGGAGG | mo- | |
| | | | GGAGGGTAATCACAAC | gtttcaggt | GTAATCACAAC | nu- | |
| | | | (SEQ ID. NO: 1953) | (SEQ ID. | (SEQ ID. | clease | |
| | | | | NO: | NO: 1955) | | |
| | | | | 1954) | | | |
| 7a | thermo_4 | CcaCas13b | ctacaccttttttaggatgctttgt | ctacacctttt | GTTGGAACTGCT | Ther- | 7a |
| | 8 | | ttcagGTTGGAACTGCTCTCATTTT | ttaggatgctt | CTCATTTTGGAGG | mo- | |
| | | | GGAGGGTAATCACAAC | tgtttcag | GTAATCACAAC | nu- | |
| | | | (SEQ ID. NO: 1956) | (SEQ ID. | (SEQ ID. | clease | |
| | | | | NO: | NO: 1958) | | |
| | | | | 1957) | | | |
| 7a | thermo_4 | CcaCas13b | ctctacaccttttttaggatgcttt | ctctacacctt | GTTGGAACTGCT | Ther- | 7a |
| | 9 | | gtttcGTTGGAACTGCTCTCATTTT | ttttaggatgc | CTCATTTTGGAGG | mo- | |
| | | | GGAGGGTAATCACAAC | tttgtttc | GTAATCACAAC | nu- | |
| | | | (SEQ ID. NO: 1959) | (SEQ ID. | (SEQ ID. | clease | |
| | | | | NO: | NO: 1961) | | |
| | | | | 1960) | | | |
| 7a | thermo_5 | CcaCas13b | ttctctacaccttttttaggatgct | ttctctacacc | GTTGGAACTGCT | Ther- | 7a |
| | 0 | | ttgttGTTGGAACTGCTCTCATTTT | ttttttaggat | CTCATTTTGGAGG | mo- | |
| | | | GGAGGGTAATCACAAC | gctttgtt | GTAATCACAAC | nu- | |
| | | | (SEQ ID. NO: 1962) | (SEQ ID. | (SEQ ID. | clease | |
| | | | | NO: | NO: 1964) | | |
| | | | | 1963) | | | |
| 7a | thermo_5 | CcaCas13b | atttctctacaccttttttaggatg | atttctctaca | GTTGGAACTGCT | Ther- | 7a |
| | 1 | | ctttgGTTGGAACTGCTCTCATTTT | ccttttttagg | CTCATTTTGGAGG | mo- | |
| | | | GGAGGGTAATCACAAC | atgctttg | GTAATCACAAC | nu- | |
| | | | (SEQ ID. NO: 1965) | (SEQ ID. | (SEQ ID. | clease | |
| | | | | NO: | NO: 1967) | | |
| | | | | 1966) | | | |
| 7a | thermo_5 | CcaCas13b | atatttctctacaccttttttagga | atatttctcta | GTTGGAACTGCT | Ther- | 7a |
| | 2 | | tgcttGTTGGAACTGCTCTCATTTT | cacctttttta | CTCATTTTGGAGG | mo- | |
| | | | GGAGGGTAATCACAAC | ggatgctt | GTAATCACAAC | nu- | |
| | | | (SEQ ID. NO: 1968) | (SEQ ID. | (SEQ ID. | clease | |
| | | | | NO: | NO: 1970) | | |
| | | | | 1969) | | | |
| 7a | thermo_5 | CcaCas13b | ccatatttctctacaccttttttag | ccatatttctc | GTTGGAACTGCT | Ther- | 7a |
| | 3 | | gatgcGTTGGAACTGCTCTCATTTT | tacaccttttt | CTCATTTTGGAGG | mo- | |
| | | | GGAGGGTAATCACAAC | taggatgc | GTAATCACAAC | nu- | |
| | | | (SEQ ID. NO: 1971) | (SEQ ID. | (SEQ ID. | clease | |
| | | | | NO: | NO: 1973) | | |
| | | | | 1972) | | | |
| 7a | thermo_5 | CcaCas13b | gaccatatttctctacacctttttt | gaccatattt | GTTGGAACTGCT | Ther- | 7a |
| | 4 | | aggatGTTGGAACTGCTCTCATTTT | ctctacacctt | CTCATTTTGGAGG | mo- | |
| | | | GGAGGGTAATCACAAC | ttttaggat | GTAATCACAAC | nu- | |
| | | | (SEQ ID. NO: 1974) | (SEQ ID. | (SEQ ID. | clease | |
| | | | | NO: | NO: 1976) | | |
| | | | | 1975) | | | |
| 7a | thermo_5 | CcaCas13b | aggaccatatttctctacacctttt | aggaccatat | GTTGGAACTGCT | Ther- | 7a |
| | 5 | | ttaggGTTGGAACTGCTCTCATTTT | ttctctacacc | CTCATTTTGGAGG | mo- | |
| | | | GGAGGGTAATCACAAC | ttttttagg | GTAATCACAAC | nu- | |
| | | | (SEQ ID. NO: 1977) | (SEQ ID. | (SEQ ID. | clease | |
| | | | | NO: | NO: 1979) | | |
| | | | | 1978) | | | |
| 7a | thermo_5 | CcaCas13b | tcaggaccatatttctctacacctt | tcaggaccat | GTTGGAACTGCT | Ther- | 7a |
| | 6 | | ttttaGTTGGAACTGCTCTCATTTT | atttctctaca | CTCATTTTGGAGG | mo- | |
| | | | GGAGGGTAATCACAAC | cctttttta | GTAATCACAAC | nu- | |
| | | | (SEQ ID. NO: 1980) | (SEQ ID. | (SEQ ID. | clease | |
| | | | | NO: | NO: 1982) | | |
| | | | | 1981) | | | |
| 7a | thermo_5 | CcaCas13b | cttcaggaccatatttctctacacc | cttcaggacc | GTTGGAACTGCT | Ther- | 7a |
| | 7 | | tttttGTTGGAACTGCTCTCATTTT | atatttctcta | CTCATTTTGGAGG | mo- | |
| | | | GGAGGGTAATCACAAC | caccttttt | GTAATCACAAC | nu- | |
| | | | (SEQ ID. NO: 1983) | (SEQ ID. | (SEQ ID. | clease | |
| | | | | NO: | NO: 1985) | | |
| | | | | 1984) | | | |
| 7a | thermo_5 | CcaCas13b | tgcttcaggaccatatttctctaca | tgcttcagga | GTTGGAACTGCT | Ther- | 7a |
| | 8 | | cctttGTTGGAACTGCTCTCATTTT | ccatatttctc | CTCATTTTGGAGG | mo- | |
| | | | GGAGGGTAATCACAAC | tacaccttt | GTAATCACAAC | nu- | |
| | | | (SEQ ID. NO: 1986) | (SEQ ID. | (SEQ ID. | clease | |
| | | | | NO: | NO: 1988) | | |
| | | | | 1987) | | | |
| 7a | thermo_5 | CcaCas13b | cttgcttcaggaccatatttctcta | cttgcttcag | GTTGGAACTGCT | Ther- | 7a |
| | 9 | | cacctGTTGGAACTGCTCTCATTTT | gaccatattt | CTCATTTTGGAGG | mo- | |
| | | | GGAGGGTAATCACAAC | ctctacacct | GTAATCACAAC | nu- | |
| | | | (SEQ ID. NO: 1989) | (SEQ ID. | (SEQ ID. | clease | |
| | | | | NO: | NO: 1991) | | |
| | | | | 1990) | | | |
| 7a | thermo_6 | CcaCas13b | cacttgcttcaggaccatatttctc | cacttgcttc | GTTGGAACTGCT | Ther- | 7a |
| | 0 | | tacacGTTGGAACTGCTCTCATTTT | aggaccatat | CTCATTTTGGAGG | mo- | |
| | | | GGAGGGTAATCACAAC | ttctctacac | GTAATCACAAC | nu- | |
| | | | (SEQ ID. NO: 1992) | (SEQ ID. | (SEQ ID. | clease | |
| | | | | NO: | NO: 1994) | | |
| | | | | 1993) | | | |
| 7a | thermo_6 | CcaCas13b | tgcacttgcttcaggaccatatttc | tgcacttgctt | GTTGGAACTGCT | Ther- | 7a |
| | 1 | | tctacGTTGGAACTGCTCTCATTTT | caggaccat | CTCATTTTGGAGG | mo- | |
| | | | GGAGGGTAATCACAAC | atttctctac | GTAATCACAAC | nu- | |
| | | | (SEQ ID. NO: 1995) | (SEQ ID. | (SEQ ID. | clease | |
| | | | | NO: | NO: 1997) | | |
| | | | | 1996) | | | |
| 7a | thermo_6 | CcaCas13b | aatgcacttgcttcaggaccatatt | aatgcacttg | GTTGGAACTGCT | Ther- | 7a |
| | 2 | | tctctGTTGGAACTGCTCTCATTTT | cttcaggacc | CTCATTTTGGAGG | mo- | |
| | | | GGAGGGTAATCACAAC | atatttctct | GTAATCACAAC | nu- | |
| | | | (SEQ ID. NO: 1998) | (SEQ ID. | (SEQ ID. | clease | |
| | | | | NO: | NO: 2000) | | |
| | | | | 1999) | | | |
| 7a | thermo_6 | CcaCas13b | taaatgcacttgcttcaggaccata | taaatgcact | GTTGGAACTGCT | Ther- | 7a |
| | 3 | | tttctGTTGGAACTGCTCTCATTTT | tgcttcagga | CTCATTTTGGAGG | mo- | |
| | | | GGAGGGTAATCACAAC | ccatatttct | GTAATCACAAC | nu- | |
| | | | (SEQ ID. NO: 2001) | (SEQ ID. | (SEQ ID. | clease | |
| | | | | NO: | NO: 2003) | | |
| | | | | 2002) | | | |
| 7a | thermo_6 | CcaCas13b | cgtaaatgcacttgcttcaggacca | cgtaaatgca | GTTGGAACTGCT | Ther- | 7a |
| | 4 | | tatttGTTGGAACTGCTCTCATTTT | cttgcttcag | CTCATTTTGGAGG | mo- | |
| | | | GGAGGGTAATCACAAC | gaccatattt | GTAATCACAAC | nu- | |
| | | | (SEQ ID. NO: 2004) | (SEQ ID. | (SEQ ID. | clease | |
| | | | | NO: | NO: 2006) | | |
| | | | | 2005) | | | |
| 7a | thermo_6 | CcaCas13b | tcgtaaatgcacttgcttcaggacc | tcgtaaatgc | GTTGGAACTGCT | Ther- | 7a |
| | 5 | | atattGTTGGAACTGCTCTCATTTT | acttgcttca | CTCATTTTGGAGG | mo- | |
| | | | GGAGGGTAATCACAAC | ggaccatatt | GTAATCACAAC | nu- | |
| | | | (SEQ ID. NO: 2007) | (SEQ ID. | (SEQ ID. | clease | |
| | | | | NO: | NO: 2009) | | |
| | | | | 2008) | | | |
| 7a | thermo_6 | CcaCas13b | ttcgtaaatgcacttgcttcaggac | ttcgtaaatg | GTTGGAACTGCT | Ther- | 7a |
| | 6 | | atatGTTGGAACTGCTCTCATTTT | cacttgcttc | CTCATTTTGGAGG | mo- | |
| | | | GcGAGGGTAATCACAAC | aggaccatat | GTAATCACAAC | nu- | |
| | | | (SEQ ID. NO: 2010) | (SEQ ID. | (SEQ ID. | clease | |
| | | | | NO: | NO: 2012) | | |
| | | | | 2011) | | | |
| 7a | thermo_6 | CcaCas13b | tttcgtaaatgcacttgcttcagga | tttcgtaaatg | GTTGGAACTGCT | Ther- | 7a |
| | 7 | | ccataGTTGGAACTGCTCTCATTTT | cacttgcttc | CTCATTTTGGAGG | mo- | |
| | | | GGAGGGTAATCACAAC | aggaccata | GTAATCACAAC | nu- | |
| | | | (SEQ ID. NO: 2013) | (SEQ ID. | (SEQ ID. | clease | |
| | | | | NO: | NO: 2015) | | |
| | | | | 2014) | | | |
| 7a | thermo_6 | CcaCas13b | ttttcgtaaatgcacttgcttcagg | ttttcgtaaat | GTTGGAACTGCT | Ther- | 7a |
| | 8 | | ccatGTTGGAACTGCTCTCATTTT | gcacttgctt | CTCATTTTGGAGG | mo- | |
| | | | aGGAGGGTAATCACAAC | caggaccat | GTAATCACAAC | nu- | |
| | | | (SEQ ID. NO: 2016) | (SEQ ID. | (SEQ ID. | clease | |
| | | | | NO: | NO: 2018) | | |
| | | | | 2017) | | | |
| 7a | thermo_6 | CcaCas13b | tttttcgtaaatgcacttgcttcag | tttttcgtaaa | GTTGGAACTGCT | Ther- | 7a |
| | 9 | | gaccaGTTGGAACTGCTCTCATTTT | tgcacttgctt | CTCATTTTGGAGG | mo- | |
| | | | GGAGGGTAATCACAAC | caggacca | GTAATCACAAC | nu- | |
| | | | (SEQ ID. NO: 2019) | (SEQ ID. | (SEQ ID. | clease | |
| | | | | NO: | NO: 2021) | | |
| | | | | 2020) | | | |
| 7a | thermo_7 | CcaCas13b | ctttttcgtaaatgcacttgcttca | ctttttcgtaa | GTTGGAACTGCT | Ther- | 7a |
| | 0 | | ggaccGTTGGAACTGCTCTCATTTT | atgcacttgc | CTCATTTTGGAGG | mo- | |
| | | | GGAGGGTAATCACAAC | ttcaggacc | GTAATCACAAC | nu- | |
| | | | (SEQ ID. NO: 2022) | (SEQ ID. | (SEQ ID. | clease | |
| | | | | NO: | NO: 2024) | | |
| | | | | 2023) | | | |
| 7a | thermo_7 | CcaCas13b | tctttttcgtaaatgcacttgcttc | tctttttcgta | GTTGGAACTGCT | Ther- | 7a |
| | 1 | | aggacGTTGGAACTGCTCTCATTTT | aatgcacttgc | CTCATTTTGGAGG | mo- | |
| | | | GGAGGGTAATCACAAC | ttcaggac | GTAATCACAAC | nu- | |
| | | | (SEQ ID. NO: 2025) | (SEQ ID. | (SEQ ID. | clease | |
| | | | | NO: | NO: 2027) | | |
| | | | | 2026) | | | |
| 7a | thermo_7 | CcaCas13b | atctttttcgtaaatgcacttgctt | atctttttcgt | GTTGGAACTGCT | Ther- | 7a |
| | 2 | | caggaGTTGGAACTGCTCTCATTTT | aaatgcacttg | CTCATTTTGGAGG | mo- | |
| | | | GGAGGGTAATCACAAC | cttcagga | GTAATCACAAC | nu- | |
| | | | (SEQ ID. NO: 2028) | (SEQ ID. | (SEQ ID. | clease | |
| | | | | NO: | NO: 2030) | | |
| | | | | 2029) | | | |
| 7a | thermo_7 | CcaCas13b | catctttttcgtaaatgcacttgct | catctttttcg | GTTGGAACTGCT | Ther- | 7a |
| | 3 | | tcaggGTTGGAACTGCTCTCATTTT | taaatgcactt | CTCATTTTGGAGG | mo- | |
| | | | GGAGGGTAATCACAAC | gcttcagg | GTAATCACAAC | nu- | |
| | | | (SEQ ID. NO: 2031) | (SEQ ID. | (SEQ ID. | clease | |
| | | | | NO: | NO: 2033) | | |
| | | | | 2032) | | | |
| 7a | thermo_7 | CcaCas13b | ccatctttttcgtaaatgcacttgc | ccatctttttc | GTTGGAACTGCT | Ther- | 7a |
| | 4 | | ttcagGTTGGAACTGCTCTCATTTT | gtaaatgcac | CTCATTTTGGAGG | mo- | |
| | | | GGAGGGTAATCACAAC | ttgcttcag | GTAATCACAAC | nu- | |
| | | | (SEQ ID. NO: 2034) | (SEQ ID. | (SEQ ID. | clease | |
| | | | | NO: | NO: 2036) | | |
| | | | | 2035) | | | |
| 7a | thermo_7 | CcaCas13b | accatctttttcgtaaatgcacttg | accatcttttt | GTTGGAACTGCT | Ther- | 7a |
| | 5 | | cttcaGTTGGAACTGCTCTCATTTT | cgtaaatgca | CTCATTTTGGAGG | mo- | |
| | | | GGAGGGTAATCACAAC | cttgcttca | GTAATCACAAC | nu- | |
| | | | (SEQ ID. NO: 2037) | (SEQ ID. | (SEQ ID. | clease | |
| | | | | NO: | NO: 2039) | | |
| | | | | 2038) | | | |
| 7a | thermo_7 | CcaCas13b | taccatctttttcgtaaatgcactt | taccatctttt | GTTGGAACTGCT | Ther- | 7a |
| | 6 | | gcttcGTTGGAACTGCTCTCATTTT | tcgtaaatgca | CTCATTTTGGAGG | mo- | |
| | | | GGAGGGTAATCACAAC | cttgcttc | GTAATCACAAC | nu- | |
| | | | (SEQ ID. NO: 2040) | (SEQ ID. | (SEQ ID. | clease | |
| | | | | NO: | NO: 2042) | | |
| | | | | 2041) | | | |
| 7a | thermo_7 | CcaCas13b | ctaccatctttttcgtaaatgcact | ctaccatcttt | GTTGGAACTGCT | Ther- | 7a |
| | 7 | | gtcttGTTGGAACTGCTCTCATTTT | ttcgtaaatg | CTCATTTTGGAGG | mo- | |
| | | | GGAGGGTAATCACAAC | cacttgctt | GTAATCACAAC | nu- | |
| | | | (SEQ ID. NO: 2043) | (SEQ ID. | (SEQ ID. | clease | |
| | | | | NO: | NO: 2045) | | |
| | | | | 2044) | | | |
| 7a | thermo_7 | CcaCas13b | tctaccatctttttcgtaaatgcac | tctaccatctt | GTTGGAACTGCT | Ther- | 7a |
| | 8 | | ttgctGTTGGAACTGCTCTCATTTT | tttcgtaaatg | CTCATTTTGGAGG | mo- | |
| | | | GGAGGGTAATCACAAC | cacttgct | GTAATCACAAC | nu- | |
| | | | (SEQ ID. NO: 2046) | (SEQ ID. | (SEQ ID. | clease | |
| | | | | NO: | NO: 2048) | | |
| | | | | 2047) | | | |
| 7a | thermo_7 | CcaCas13b | ttctaccatctttttcgtaaatgca | ttctaccatct | GTTGGAACTGCT | Ther- | 7a |
| | 9 | | ttgcGTTGGAACTGCTCTCATTTT | ttttcgtaaat | CTCATTTTGGAGG | mo- | |
| | | | GcGAGGGTAATCACAAC | gcacttgc | GTAATCACAAC | nu- | |
| | | | (SEQ ID. NO: 2049) | (SEQ ID. | (SEQ ID. | clease | |
| | | | | NO: | NO: 2051) | | |
| | | | | 2050) | | | |
| 7a | thermo_8 | CcaCas13b | tttctaccatctttttcgtaaatgc | tttctaccatc | GTTGGAACTGCT | Ther- | 7a |
| | 0 | | acttgGTTGGAACTGCTCTCATTTT | tttttcgtaaa | CTCATTTTGGAGG | mo- | |
| | | | GGAGGGTAATCACAAC | tgcacttg | GTAATCACAAC | nu- | |
| | | | (SEQ ID. NO: 2052) | (SEQ ID. | (SEQ ID. | clease | |
| | | | | NO: | NO: 2054) | | |
| | | | | 2053) | | | |
| 7a | thermo_8 | CcaCas13b | ttttctaccatctttttcgtaaatg | ttttctaccat | GTTGGAACTGCT | Ther- | 7a |
| | 1 | | cacttGTTGGAACTGCTCTCATTTT | ctttttcgtaa | CTCATTTTGGAGG | mo- | |
| | | | GGAGGGTAATCACAAC | atgcactt | GTAATCACAAC | nu- | |
| | | | (SEQ ID. NO: 2055) | (SEQ ID. | (SEQ ID. | clease | |
| | | | | NO: | NO: 2057) | | |
| | | | | 2056) | | | |
| 7a | thermo_8 | CcaCas13b | attttctaccatctttttcgtaaat | attttctacca | GTTGGAACTGCT | Ther- | 7a |
| | 2 | | gcactGTTGGAACTGCTCTCATTTT | tctttttcgta | CTCATTTTGGAGG | mo- | |
| | | | GGAGGGTAATCACAAC | aatgcact | GTAATCACAAC | nu- | |
| | | | (SEQ ID. NO: 2058) | (SEQ ID. | (SEQ ID. | clease | |
| | | | | NO: | NO: 2060) | | |
| | | | | 2059) | | | |
| 7a | thermo_8 | CcaCas13b | cattttctaccatctttttcgtaaa | cattttctacc | GTTGGAACTGCT | Ther- | 7a |
| | 3 | | tgcacGTTGGAACTGCTCTCATTTT | atctttttcgt | CTCATTTTGGAGG | mo- | |
| | | | GGAGGGTAATCACAAC | aaatgcac | GTAATCACAAC | nu- | |
| | | | (SEQ ID. NO: 2061) | (SEQ ID. | (SEQ ID. | clease | |
| | | | | NO: | NO: 2063) | | |
| | | | | 2062) | | | |
| 7a | thermo_8 | CcaCas13b | gcattttctaccatctttttcgtaa | gcattttctac | GTTGGAACTGCT | Ther- | 7a |
| | 4 | | atgcaGTTGGAACTGCTCTCATTTT | catctttttcg | CTCATTTTGGAGG | mo- | |
| | | | GGAGGGTAATCACAAC | taaatgca | GTAATCACAAC | nu- | |
| | | | (SEQ ID. NO: 2064) | (SEQ ID. | (SEQ ID. | clease | |
| | | | | NO: | NO: 2066) | | |
| | | | | 2065) | | | |
| 7a | thermo_8 | CcaCas13b | tgcattttctaccatctttttcgta | tgcattttcta | GTTGGAACTGCT | Ther- | 7a |
| | 5 | | aatgcGTTGGAACTGCTCTCATTTT | ccatctttttc | CTCATTTTGGAGG | mo- | |
| | | | GGAGGGTAATCACAAC | gtaaatgc | GTAATCACAAC | nu- | |
| | | | (SEQ ID. NO: 2067) | (SEQ ID. | (SEQ ID. | clease | |
| | | | | NO: | NO: 2069) | | |
| | | | | 2068) | | | |
| 7a | thermo_8 | CcaCas13b | ttgcattttctaccatctttttcgt | ttgcattttct | GTTGGAACTGCT | Ther- | 7a |
| | 6 | | aaatgGTTGGAACTGCTCTCATTTT | accatcttttt | CTCATTTTGGAGG | mo- | |
| | | | GGAGGGTAATCACAAC | cgtaaatg | GTAATCACAAC | nu- | |
| | | | (SEQ ID. NO: 2070) | (SEQ ID. | (SEQ ID. | clease | |
| | | | | NO: | NO: 2072) | | |
| | | | | 2071) | | | |
| 7a | thermo_8 | CcaCas13b | tttgcattttctaccatctttttcg | tttgcattttc | GTTGGAACTGCT | Ther- | 7a |
| | 7 | | taaatGTTGGAACTGCTCTCATTTT | taccatctttt | CTCATTTTGGAGG | mo- | |
| | | | GGAGGGTAATCACAAC | tcgtaaat | GTAATCACAAC | nu- | |
| | | | (SEQ ID. NO: 2073) | (SEQ ID. | (SEQ ID. | clease | |
| | | | | NO: | NO: 2075) | | |
| | | | | 2074) | | | |
| 7a | thermo_8 | CcaCas13b | ctttgcattttctaccatctttttc | ctttgcatttt | GTTGGAACTGCT | Ther- | 7a |
| | 8 | | gtaaaGTTGGAACTGCTCTCATTTT | ctaccatcttt | CTCATTTTGGAGG | mo- | |
| | | | GGAGGGTAATCACAAC | ttcgtaaa | GTAATCACAAC | nu- | |
| | | | (SEQ ID. NO: 2076) | (SEQ ID. | (SEQ ID. | clease | |
| | | | | NO: | NO: 2078) | | |
| | | | | 2077) | | | |
| 7a | thermo_8 | CcaCas13b | tctttgcattttctaccatcttttt | tctttgcattt | GTTGGAACTGCT | Ther- | 7a |
| | 9 | | cgtaaGTTGGAACTGCTCTCATTTT | tctaccatctt | CTCATTTTGGAGG | mo- | |
| | | | GGAGGGTAATCACAAC | tttcgtaa | GTAATCACAAC | nu- | |
| | | | (SEQ ID. NO: 2079) | (SEQ ID. | (SEQ ID. | clease | |
| | | | | NO: | NO: 2081) | | |
| | | | | 2080) | | | |
| 7a | thermo_9 | CcaCas13b | ttctttgcattttctaccatctttt | ttctttgcatt | GTTGGAACTGCT | Ther- | 7a |
| | 0 | | tcgtaGTTGGAACTGCTCTCATTTT | ttctaccatct | CTCATTTTGGAGG | mo- | |
| | | | GGAGGGTAATCACAAC | ttttcgta | GTAATCACAAC | nu- | |
| | | | (SEQ ID. NO: 2082) | (SEQ ID. | (SEQ ID. | clease | |
| | | | | NO: | NO: 2084) | | |
| | | | | 2083) | | | |
| 7a | thermo_9 | CcaCas13b | tttctttgcattttctaccatcttt | tttctttgcat | GTTGGAACTGCT | Ther- | 7a |
| | 1 | | ttcgtGTTGGAACTGCTCTCATTTT | tttctaccatc | CTCATTTTGGAGG | mo- | |
| | | | GGAGGGTAATCACAAC | tttttcgt | GTAATCACAAC | nu- | |
| | | | (SEQ ID. NO: 2085) | (SEQ ID. | (SEQ ID. | clease | |
| | | | | NO: | NO: 2087) | | |
| | | | | 2086) | | | |
| 7a | thermo_9 | CcaCas13b | ttttctttgcattttctaccatctt | ttttctttgca | GTTGGAACTGCT | Ther- | 7a |
| | 2 | | tttcgGTTGGAACTGCTCTCATTTT | ttttctaccat | CTCATTTTGGAGG | mo- | |
| | | | GGAGGGTAATCACAAC | ctttttcg | GTAATCACAAC | nu- | |
| | | | (SEQ ID. NO: 2088) | (SEQ ID. | (SEQ ID. | clease | |
| | | | | NO: | NO: 2090) | | |
| | | | | 2089) | | | |
| 7a | thermo_9 | CcaCas13b | attttctttgcattttctaccatct | attttctttgc | GTTGGAACTGCT | Ther- | 7a |
| | 3 | | ttttcGTTGGAACTGCTCTCATTTT | attttctacca | CTCATTTTGGAGG | mo- | |
| | | | GGAGGGTAATCACAAC | tctttttc | GTAATCACAAC | nu- | |
| | | | (SEQ ID. NO: 2091) | (SEQ ID. | (SEQ ID. | clease | |
| | | | | NO: | NO: 2093) | | |
| | | | | 2092) | | | |
| 7a | thermo_9 | CcaCas13b | aattttctttgcattttctaccatc | aattttctttg | GTTGGAACTGCT | Ther- | 7a |
| | 4 | | tttttGTTGGAACTGCTCTCATTTT | cattttctacc | CTCATTTTGGAGG | mo- | |
| | | | GGAGGGTAATCACAAC | atcttttt | GTAATCACAAC | nu- | |
| | | | (SEQ ID. NO: 2094) | (SEQ ID. | (SEQ ID. | clease | |
| | | | | NO: | NO: 2096) | | |
| | | | | 2095) | | | |
| 7a | thermo_9 | CcaCas13b | caattttctttgcattttctaccat | caattttcttt | GTTGGAACTGCT | Ther- | 7a |
| | 5 | | cttttGTTGGAACTGCTCTCATTTT | gcattttctac | CTCATTTTGGAGG | mo- | |
| | | | GGAGGGTAATCACAAC | catctttt | GTAATCACAAC | nu- | |
| | | | (SEQ ID. NO: 2097) | (SEQ ID. | (SEQ ID. | clease | |
| | | | | NO: | NO: 2099) | | |
| | | | | 2098) | | | |
| 7a | ssrna1_0 | CcaCas13b | atccccgggtaccgagctcgaattc | atccccggg | GTTGGAACTGCT | ssRNA1 | 7a |
| | | | actggGTTGGAACTGCTCTCATTT | taccgagctc | CTCATTTTGGAGG | | |
| | | | TGGAGGGTAATCACAAC | gaattcactg | GTAATCACAAC | | |
| | | | (SEQ ID. NO: 2100) | g (SEQ | (SEQ ID. | | |
| | | | | ID. NO: | NO: 2102) | | |
| | | | | 2101) | | | |
| 7a | ssrna1_1 | CcaCas13b | gatccccgggtaccgagctcgaatt | gatccccgg | GTTGGAACTGCT | ssRNA1 | 7a |
| | | | cactgGTTGGAACTGCTCTCATTTT | gtaccgagc | CTCATTTTGGAGG | | |
| | | | GGAGGGTAATCACAAC | tcgaattcac | GTAATCACAAC | | |
| | | | (SEQ ID. NO: 2103) | tg (SEQ | (SEQ ID. | | |
| | | | | ID. NO: | NO: 2105) | | |
| | | | | 2104) | | | |
| 7a | ssrna1_2 | CcaCas13b | ggatccccgggtaccgagctcgaat | ggatccccg | GTTGGAACTGCT | ssRNA1 | 7a |
| | | | tcactGTTGGAACTGCTCTCATTTT | ggtaccgag | CTCATTTTGGAGG | | |
| | | | GGAGGGTAATCACAAC | ctcgaattca | GTAATCACAAC | | |
| | | | (SEQ ID. NO: 2106) | ct (SEQ | (SEQ ID. | | |
| | | | | ID. NO: | NO: 2108) | | |
| | | | | 2107) | | | |
| 7a | ssrna1_3 | CcaCas13b | agaggatccccgggtaccgagctcg | agaggatcc | GTTGGAACTGCT | ssRNA1 | 7a |
| | | | aattcGTTGGAACTGCTCTCATTTT | ccgggtacc | CTCATTTTGGAGG | | |
| | | | GGAGGGTAATCACAAC | gagctcgaa | GTAATCACAAC | | |
| | | | (SEQ ID. NO: 2109) | ttc (SEQ | (SEQ ID. | | |
| | | | | ID. NO: | NO: 2111) | | |
| | | | | 2110) | | | |
| 7a | ssrna1_4 | CcaCas13b | ctagaggatccccgggtaccgagct | ctagaggat | GTTGGAACTGCT | ssRNA1 | 7a |
| | | | cgaatGTTGGAACTGCTCTCATTTT | ccccgggta | CTCATTTTGGAGG | | |
| | | | GGAGGGTAATCACAAC | ccgagctcg | GTAATCACAAC | | |
| | | | (SEQ ID. NO: 2112) | aat (SEQ | (SEQ ID. | | |
| | | | | ID. NO: | NO: 2114) | | |
| | | | | 2113) | | | |
| 7a | ssrna1_5 | CcaCas13b | tttctagaggatccccgggtaccga | tttctagagg | GTTGGAACTGCT | ssRNA1 | 7a |
| | | | gctcgGTTGGAACTGCTCTCATTTT | atccccggg | CTCATTTTGGAGG | | |
| | | | GGAGGGTAATCACAAC | taccgagctc | GTAATCACAAC | | |
| | | | (SEQ ID. NO: 2115) | g (SEQ | (SEQ ID. | | |
| | | | | ID. NO: | NO: 2117) | | |
| | | | | 2116) | | | |
| 7a | ssrna1_6 | CcaCas13b | atttctagaggatccccgggtaccg | atttctagag | GTTGGAACTGCT | ssRNA1 | 7a |
| | | | agctcGTTGGAACTGCTCTCATTTT | gatccccgg | CTCATTTTGGAGG | | |
| | | | GGAGGGTAATCACAAC | gtaccgagc | GTAATCACAAC | | |
| | | | (SEQ ID. NO: 2118) | tc (SEQ | (SEQ ID. | | |
| | | | | ID. NO: | NO: 2120) | | |
| | | | | 2119) | | | |
| 7a | ssrna1_7 | CcaCas13b | atatttctagaggatccccgggtac | atatttctaga | GTTGGAACTGCT | ssRNA1 | 7a |
| | | | cgagcGTTGGAACTGCTCTCATTTT | ggatccccg | CTCATTTTGGAGG | | |
| | | | GGAGGGTAATCACAAC | ggtaccgag | GTAATCACAAC | | |
| | | | (SEQ ID. NO: 2121) | c (SEQ | (SEQ ID. | | |
| | | | | ID. NO: | NO: 2123) | | |
| | | | | 2122) | | | |
| 7a | ssrna1_8 | CcaCas13b | catatttctagaggatccccgggta | catatttctag | GTTGGAACTGCT | ssRNA1 | 7a |
| | | | ccgagGTTGGAACTGCTCTCATTTT | aggatcccc | CTCATTTTGGAGG | | |
| | | | GGAGGGTAATCACAAC | gggtaccga | GTAATCACAAC | | |
| | | | (SEQ ID. NO: 2124) | g (SEQ | (SEQ ID. | | |
| | | | | ID. NO: | NO: 2126) | | |
| | | | | 2125) | | | |
| 7a | ssrna1_9 | CcaCas13b | atccatatttctagaggatccccgg | atccatatttc | GTTGGAACTGCT | ssRNA1 | 7a |
| | | | gtaccGTTGGAACTGCTCTCATTTT | tagaggatc | CTCATTTTGGAGG | | |
| | | | GGAGGGTAATCACAAC | cccgggtac | GTAATCACAAC | | |
| | | | (SEQ ID. NO: 2127) | c (SEQ | (SEQ ID. | | |
| | | | | ID. NO: | NO: 2129) | | |
| | | | | 2128) | | | |
| 7a | ssrna1_10 | CcaCas13b | aatccatatttctagaggatccccg | aatccatattt | GTTGGAACTGCT | ssRNA1 | 7a |
| | | | ggtacGTTGGAACTGCTCTCATTTT | ctagaggat | CTCATTTTGGAGG | | |
| | | | GGAGGGTAATCACAAC | ccccgggta | GTAATCACAAC | | |
| | | | (SEQ ID. NO: 2130) | c (SEQ | (SEQ ID. | | |
| | | | | ID. NO: | NO: 2132) | | |
| | | | | 2131) | | | |
| 7a | ssrna1_11 | CcaCas13b | taatccatatttctagaggatcccc | taatccatatt | GTTGGAACTGCT | ssRNA1 | 7a |
| | | | gggtaGTTGGAACTGCTCTCATTTT | tctagaggat | CTCATTTTGGAGG | | |
| | | | GGAGGGTAATCACAAC | ccccgggta | GTAATCACAAC | | |
| | | | (SEQ ID. NO: 2133) | (SEQ ID. | (SEQ ID. | | |
| | | | | NO: | NO: 2135) | | |
| | | | | 2134) | | | |
| 7a | ssrna1_12 | CcaCas13b | agtaatccatatttctagaggatcc | agtaatccat | GTTGGAACTGCT | ssRNA1 | 7a |
| | | | ccgggGTTGGAACTGCTCTCATTTT | atttctagag | CTCATTTTGGAGG | | |
| | | | GGAGGGTAATCACAAC | gatccccgg | GTAATCACAAC | | |
| | | | (SEQ ID. NO: 2136) | g (SEQ | (SEQ ID. | | |
| | | | | ID. NO: | NO: 2138) | | |
| | | | | 2137) | | | |
| 7a | ssrna1_13 | CcaCas13b | aagtaatccatatttctagaggatc | aagtaatcca | GTTGGAACTGCT | ssRNA1 | 7a |
| | | | cccggGTTGGAACTGCTCTCATTTT | tatttctagag | CTCATTTTGGAGG | | |
| | | | GGAGGGTAATCACAAC | gatccccgg | GTAATCACAAC | | |
| | | | (SEQ ID. NO: 2139) | (SEQ ID. | (SEQ ID. | | |
| | | | | NO: | NO: 2141) | | |
| | | | | 2140) | | | |
| 7a | ssrna1_14 | CcaCas13b | tctaccaagtaatccatatttctag | tctaccaagt | GTTGGAACTGCT | ssRNA1 | 7a |
| | | | aggatGTTGGAACTGCTCTCATTTT | aatccatattt | CTCATTTTGGAGG | | |
| | | | GGAGGGTAATCACAAC | ctagaggat | GTAATCACAAC | | |
| | | | (SEQ ID. NO: 2142) | (SEQ ID. | (SEQ ID. | | |
| | | | | NO: | NO: 2144) | | |
| | | | | 2143) | | | |
| 7a | ssrna1_15 | CcaCas13b | gttctaccaagtaatccatatttct | gttctaccaa | GTTGGAACTGCT | ssRNA1 | 7a |
| | | | agaggGTTGGAACTGCTCTCATTTT | gtaatccata | CTCATTTTGGAGG | | |
| | | | GGAGGGTAATCACAAC | tttctagagg | GTAATCACAAC | | |
| | | | (SEQ ID. NO: 2145) | (SEQ ID. | (SEQ ID. | | |
| | | | | NO: | NO: 2147) | | |
| | | | | 2146) | | | |
| 7a | ssrna1_16 | CcaCas13b | ctgttctaccaagtaatccatattt | ctgttctacc | GTTGGAACTGCT | ssRNA1 | 7a |
| | | | ctagaGTTGGAACTGCTCTCATTTT | aagtaatcca | CTCATTTTGGAGG | | |
| | | | GGAGGGTAATCACAAC | tatttctaga | GTAATCACAAC | | |
| | | | (SEQ ID. NO: 2148) | (SEQ ID. | (SEQ ID. | | |
| | | | | NO: | NO: 2150) | | |
| | | | | 2149) | | | |
| 7a | ssrna1_17 | CcaCas13b | ttgctgttctaccaagtaatccata | ttgctgttcta | GTTGGAACTGCT | ssRNA1 | 7a |
| | | | tttctGTTGGAACTGCTCTCATTTT | ccaagtaatc | CTCATTTTGGAGG | | |
| | | | GGAGGGTAATCACAAC | catatttct | GTAATCACAAC | | |
| | | | (SEQ ID. NO: 2151) | (SEQ ID. | (SEQ ID. | | |
| | | | | NO: | NO: 2153) | | |
| | | | | 2152) | | | |
| 7a | ssrna1_18 | CcaCas13b | gattgctgttctaccaagtaatcca | gattgctgttc | GTTGGAACTGCT | ssRNA1 | 7a |
| | | | tatttGTTGGAACTGCTCTCATTTT | taccaagtaa | CTCATTTTGGAGG | | |
| | | | GGAGGGTAATCACAAC | tccatattt | GTAATCACAAC | | |
| | | | (SEQ ID. NO: 2154) | (SEQ ID. | (SEQ ID. | | |
| | | | | NO: | NO: 2156) | | |
| | | | | 2155) | | | |
| 7a | ssrna1_19 | CcaCas13b | agattgctgttctaccaagtaatcc | agattgctgtt | GTTGGAACTGCT | ssRNA1 | 7a |
| | | | tattGTTGGAACTGCTCTCATTTT | ctaccaagta | CTCATTTTGGAGG | | |
| | | | aGGAGGGTAATCACAAC | atccatatt | GTAATCACAAC | | |
| | | | (SEQ ID. NO: 2157) | (SEQ ID. | (SEQ ID. | | |
| | | | | NO: | NO: 2159) | | |
| | | | | 2158) | | | |
| 7a | ssrna1_20 | CcaCas13b | agtagattgctgttctaccaagtaa | agtagattgc | GTTGGAACTGCT | ssRNA1 | 7a |
| | | | tccatGTTGGAACTGCTCTCATTTT | tgttctacca | CTCATTTTGGAGG | | |
| | | | GGAGGGTAATCACAAC | agtaatccat | GTAATCACAAC | | |
| | | | (SEQ ID. NO: 2160) | (SEQ ID. | (SEQ ID. | | |
| | | | | NO: | NO: 2162) | | |
| | | | | 2161) | | | |
| 7a | ssrna1_21 | CcaCas13b | gagtagattgctgttctaccaagta | gagtagattg | GTTGGAACTGCT | ssRNA1 | 7a |
| | | | atccaGTTGGAACTGCTCTCATTTT | ctgttctacc | CTCATTTTGGAGG | | |
| | | | GGAGGGTAATCACAAC | aagtaatcca | GTAATCACAAC | | |
| | | | (SEQ ID. NO: 2163) | (SEQ ID. | (SEQ ID. | | |
| | | | | NO: | NO: 2165) | | |
| | | | | 2164) | | | |
| 7a | ssrna1_22 | CcaCas13b | cgagtagattgctgttctaccaagt | cgagtagatt | GTTGGAACTGCT | ssRNA1 | 7a |
| | | | aTatccGTGGAACTGCTCTCATTTT | gctgttctac | CTCATTTTGGAGG | | |
| | | | GGAGGGTAATCACAAC | caagtaatcc | GTAATCACAAC | | |
| | | | (SEQ ID. NO: 2166) | (SEQ ID. | (SEQ ID. | | |
| | | | | NO: | NO: 2168) | | |
| | | | | 2167) | | | |
| 7a | ssrna1_23 | CcaCas13b | tcgagtagattgctgttctaccaag | tcgagtagat | GTTGGAACTGCT | ssRNA1 | 7a |
| | | | tTaatcGTGGAACTGCTCTCATTTT | tgctgttctac | CTCATTTTGGAGG | | |
| | | | GGAGGGTAATCACAAC | caagtaatc | GTAATCACAAC | | |
| | | | (SEQ ID. NO: 2169) | (SEQ ID. | (SEQ ID. | | |
| | | | | NO: | NO: 2171) | | |
| | | | | 2170) | | | |
| 7a | ssrna1_24 | CcaCas13b | ggtcgagtagattgctgttctacca | ggtcgagta | GTTGGAACTGCT | ssRNA1 | 7a |
| | | | agtaaGTTGGAACTGCTCTCATTTT | gattgctgttc | CTCATTTTGGAGG | | |
| | | | GGAGGGTAATCACAAC | taccaagtaa | GTAATCACAAC | | |
| | | | (SEQ ID. NO: 2172) | (SEQ ID. | (SEQ ID. | | |
| | | | | NO: | NO: 2174) | | |
| | | | | 2173) | | | |
| 7a | ssrna1_25 | CcaCas13b | aggtcgagtagattgctgttctacc | aggtcgagt | GTTGGAACTGCT | ssRNA1 | 7a |
| | | | aagtaGTTGGAACTGCTCTCATTTT | agattgctgtt | CTCATTTTGGAGG | | |
| | | | GGAGGGTAATCACAAC | ctaccaagta | GTAATCACAAC | | |
| | | | (SEQ ID. NO: 2175) | (SEQ ID. | (SEQ ID. | | |
| | | | | NO: | NO: 2177) | | |
| | | | | 2176) | | | |
| 7a | ssrna1_26 | CcaCas13b | gcaggtcgagtagattgctgttcta | gcaggtcga | GTTGGAACTGCT | ssRNA1 | 7a |
| | | | ccaagGTTGGAACTGCTCTCATTTT | gtagattgct | CTCATTTTGGAGG | | |
| | | | GGAGGGTAATCACAAC | gttctaccaa | GTAATCACAAC | | |
| | | | (SEQ ID. NO: 2178) | g (SEQ | (SEQ ID. | | |
| | | | | ID. NO: | NO: 2180) | | |
| | | | | 2179) | | | |
| 7a | ssrna1_27 | CcaCas13b | tgcaggtcgagtagattgctgttct | tgcaggtcg | GTTGGAACTGCT | ssRNA1 | 7a |
| | | | accaaGTTGGAACTGCTCTCATTTT | agtagattgc | CTCATTTTGGAGG | | |
| | | | GGAGGGTAATCACAAC | tgttctacca | GTAATCACAAC | | |
| | | | (SEQ ID. NO: 2181) | a (SEQ | (SEQ ID. | | |
| | | | | ID. NO: | NO: 2183) | | |
| | | | | 2182) | | | |
| 7a | ssrna1_28 | CcaCas13b | ctgcaggtcgagtagattgctgttc | ctgcaggtc | GTTGGAACTGCT | ssRNA1 | 7a |
| | | | taccaGTTGGAACTGCTCTCATTTT | gagtagattg | CTCATTTTGGAGG | | |
| | | | GGAGGGTAATCACAAC | ctgttctacc | GTAATCACAAC | | |
| | | | (SEQ ID. NO: 2184) | a (SEQ | (SEQ ID. | | |
| | | | | ID. NO: | NO: 2186) | | |
| | | | | 2185) | | | |
| 7a | ssrna1_29 | CcaCas13b | cctgcaggtcgagtagattgctgtt | cctgcaggt | GTTGGAACTGCT | ssRNA1 | 7a |
| | | | ctaccGTTGGAACTGCTCTCATTTT | cgagtagatt | CTCATTTTGGAGG | | |
| | | | GGAGGGTAATCACAAC | gctgttctac | GTAATCACAAC | | |
| | | | (SEQ ID. NO: 2187) | c (SEQ | (SEQ ID. | | |
| | | | | ID. NO: | NO: 2189) | | |
| | | | | 2188) | | | |
| 7a | ssrna1_30 | CcaCas13b | gcctgcaggtcgagtagattgctgt | gcctgcagg | GTTGGAACTGCT | ssRNA1 | 7a |
| | | | tctacGTTGGAACTGCTCTCATTTT | tcgagtagat | CTCATTTTGGAGG | | |
| | | | GGAGGGTAATCACAAC | tgctgttctac | GTAATCACAAC | | |
| | | | (SEQ ID. NO: 2190) | (SEQ ID. | (SEQ ID. | | |
| | | | | NO: | NO: 2192) | | |
| | | | | 2191) | | | |
| 7a | ssrna1_31 | CcaCas13b | tgcctgcaggtcgagtagattgctg | tgcctgcag | GTTGGAACTGCT | ssRNA1 | 7a |
| | | | ttctaGTTGGAACTGCTCTCATTTT | gtcgagtag | CTCATTTTGGAGG | | |
| | | | GGAGGGTAATCACAAC | attgctgttct | GTAATCACAAC | | |
| | | | (SEQ ID. NO: 2193) | a (SEQ | (SEQ ID. | | |
| | | | | ID. NO: | NO: 2195) | | |
| | | | | 2194) | | | |
| 7a | ssrna1_32 | CcaCas13b | catgcctgcaggtcgagtagattgc | catgcctgca | GTTGGAACTGCT | ssRNA1 | 7a |
| | | | tgttcGTTGGAACTGCTCTCATTTT | ggtcgagta | CTCATTTTGGAGG | | |
| | | | GGAGGGTAATCACAAC | gattgctgttc | GTAATCACAAC | | |
| | | | (SEQ ID. NO: 2196) | (SEQ ID. | (SEQ ID. | | |
| | | | | NO: | NO: 2198) | | |
| | | | | 2197) | | | |
| 7a | ssrna1_33 | CcaCas13b | gcatgcctgcaggtcgagtagattg | gcatgcctg | GTTGGAACTGCT | ssRNA1 | 7a |
| | | | ctgttGTTGGAACTGCTCTCATTTT | caggtcgag | CTCATTTTGGAGG | | |
| | | | GGAGGGTAATCACAAC | tagattgctgt | GTAATCACAAC | | |
| | | | (SEQ ID. NO: 2199) | t (SEQ | (SEQ ID. | | |
| | | | | ID. NO: | NO: 2201) | | |
| | | | | 2200) | | | |
| 7a | ssrna1_34 | CcaCas13b | tgcatgcctgcaggtcgagtagatt | tgcatgcctg | GTTGGAACTGCT | ssRNA1 | 7a |
| | | | gctgtGTTGGAACTGCTCTCATTTT | caggtcgag | CTCATTTTGGAGG | | |
| | | | GGAGGGTAATCACAAC | tagattgctgt | GTAATCACAAC | | |
| | | | (SEQ ID. NO: 2202) | (SEQ ID. | (SEQ ID. | | |
| | | | | NO: | NO: 2204) | | |
| | | | | 2203) | | | |
| 7a | ssrna1_35 | CcaCas13b | cttgcatgcctgcaggtcgagtaga | cttgcatgcc | GTTGGAACTGCT | ssRNA1 | 7a |
| | | | ttgctGTTGGAACTGCTCTCATTTT | tgcaggtcg | CTCATTTTGGAGG | | |
| | | | GGAGGGTAATCACAAC | agtagattgc | GTAATCACAAC | | |
| | | | (SEQ ID. NO: 2205) | t (SEQ | (SEQ ID. | | |
| | | | | ID. NO: | NO: 2207) | | |
| | | | | 2206) | | | |
| 7a | ssrna1_36 | CcaCas13b | gcttgcatgcctgcaggtcgagtag | gcttgcatgc | GTTGGAACTGCT | ssRNA1 | 7a |
| | | | attgcGTTGGAACTGCTCTCATTTT | ctgcaggtc | CTCATTTTGGAGG | | |
| | | | GGAGGGTAATCACAAC | gagtagattg | GTAATCACAAC | | |
| | | | (SEQ ID. NO: 2208) | c (SEQ | (SEQ ID. | | |
| | | | | ID. NO: | NO: 2210) | | |
| | | | | 2209) | | | |
| 7a | ssrna1_37 | CcaCas13b | agcttgcatgcctgcaggtcgagta | agcttgcatg | GTTGGAACTGCT | ssRNA1 | 7a |
| | | | gattgGTTGGAACTGCTCTCATTTT | cctgcaggt | CTCATTTTGGAGG | | |
| | | | GGAGGGTAATCACAAC | cgagtagatt | GTAATCACAAC | | |
| | | | (SEQ ID. NO: 2211) | g (SEQ | (SEQ ID. | | |
| | | | | ID. NO: | NO: 2213) | | |
| | | | | 2212) | | | |
| 7a | ssrna1_38 | CcaCas13b | aagcttgcatgcctgcaggtcgagt | aagcttgcat | GTTGGAACTGCT | ssRNA1 | 7a |
| | | | agattGTTGGAACTGCTCTCATTTT | gcctgcagg | CTCATTTTGGAGG | | |
| | | | GGAGGGTAATCACAAC | tcgagtagat | GTAATCACAAC | | |
| | | | (SEQ ID. NO: 2214) | t (SEQ | (SEQ ID. | | |
| | | | | ID. NO: | NO: 2216) | | |
| | | | | 2215) | | | |
| 7a | ssrna1_39 | CcaCas13b | caagcttgcatgcctgcaggtcgag | caagcttgca | GTTGGAACTGCT | ssRNA1 | 7a |
| | | | tagatGTTGGAACTGCTCTCATTTT | tgcctgcag | CTCATTTTGGAGG | | |
| | | | GGAGGGTAATCACAAC | gtcgagtag | GTAATCACAAC | | |
| | | | (SEQ ID. NO: 2217) | at (SEQ | (SEQ ID. | | |
| | | | | ID. NO: | NO: 2219) | | |
| | | | | 2218) | | | |
| 7a | ssrna1_40 | CcaCas13b | ccaagcttgcatgcctgcaggtcga | ccaagcttgc | GTTGGAACTGCT | ssRNA1 | 7a |
| | | | gtagaGTTGGAACTGCTCTCATTTT | atgcctgca | CTCATTTTGGAGG | | |
| | | | GGAGGGTAATCACAAC | ggtcgagta | GTAATCACAAC | | |
| | | | (SEQ ID. NO: 2220) | ga (SEQ | (SEQ ID. | | |
| | | | | ID. NO: | NO: 2222) | | |
| | | | | 2221) | | | |
| 7a | ssrna1_41 | CcaCas13b | gccaagcttgcatgcctgcaggtcg | gccaagctt | GTTGGAACTGCT | ssRNA1 | 7a |
| | | | agtagGTTGGAACTGCTCTCATTTT | gcatgcctg | CTCATTTTGGAGG | | |
| | | | GGAGGGTAATCACAAC | caggtcgag | GTAATCACAAC | | |
| | | | (SEQ ID. NO: 2223) | tag (SEQ | (SEQ ID. | | |
| | | | | ID. NO: | NO: 2225) | | |
| | | | | 2224) | | | |
| 7a | ssrna1_42 | CcaCas13b | cgccaagcttgcatgcctgcaggtc | cgccaagctt | GTTGGAACTGCT | ssRNA1 | 7a |
| | | | gagtaGTTGGAACTGCTCTCATTTT | gcatgcctg | CTCATTTTGGAGG | | |
| | | | GGAGGGTAATCACAAC | caggtcgag | GTAATCACAAC | | |
| | | | (SEQ ID. NO: 2226) | ta (SEQ | (SEQ ID. | | |
| | | | | ID. NO: | NO: 2228) | | |
| | | | | 2227) | | | |
| 7a | ssrna1_43 | CcaCas13b | tacgccaagcttgcatgcctgcagg | tacgccaag | GTTGGAACTGCT | ssRNA1 | 7a |
| | | | tcgagGTTGGAACTGCTCTCATTTT | cttgcatgcc | CTCATTTTGGAGG | | |
| | | | GGAGGGTAATCACAAC | tgcaggtcg | GTAATCACAAC | | |
| | | | (SEQ ID. NO: 2229) | ag (SEQ | (SEQ ID. | | |
| | | | | ID. NO: | NO: 2231) | | |
| | | | | 2230) | | | |
| 7a | ssrna1_44 | CcaCas13b | ttacgccaagcttgcatgcctgcag | ttacgccaag | GTTGGAACTGCT | ssRNA1 | 7a |
| | | | gtcgaGTTGGAACTGCTCTCATTTT | cttgcatgcc | CTCATTTTGGAGG | | |
| | | | GGAGGGTAATCACAAC | tgcaggtcg | GTAATCACAAC | | |
| | | | (SEQ ID. NO: 2232) | a (SEQ | (SEQ ID. | | |
| | | | | ID. NO: | NO: 2234) | | |
| | | | | 2233) | | | |
| 7a | ssrna1_45 | CcaCas13b | attacgccaagcttgcatgcctgca | attacgccaa | GTTGGAACTGCT | ssRNA1 | 7a |
| | | | ggtcgGTTGGAACTGCTCTCATTTT | gcttgcatgc | CTCATTTTGGAGG | | |
| | | | GGAGGGTAATCACAAC | ctgcaggtc | GTAATCACAAC | | |
| | | | (SEQ ID. NO: 2235) | g (SEQ | (SEQ ID. | | |
| | | | | ID. NO: | NO: 2237) | | |
| | | | | 2236) | | | |
| 7a | ssrna1_46 | CcaCas13b | gattacgccaagcttgcatgcctgc | gattacgcca | GTTGGAACTGCT | ssRNA1 | 7a |
| | | | aggtcGTTGGAACTGCTCTCATTTT | agcttgcatg | CTCATTTTGGAGG | | |
| | | | GGAGGGTAATCACAAC | cctgcaggt | GTAATCACAAC | | |
| | | | (SEQ ID. NO: 2238) | c (SEQ | (SEQ ID. | | |
| | | | | ID. NO: | NO: 2240) | | |
| | | | | 2239) | | | |
| 7a | ssrna1_47 | CcaCas13b | tgattacgccaagcttgcatgcctg | tgattacgcc | GTTGGAACTGCT | ssRNA1 | 7a |
| | | | caggtGTTGGAACTGCTCTCATTTT | aagcttgcat | CTCATTTTGGAGG | | |
| | | | GGAGGGTAATCACAAC | gcctgcagg | GTAATCACAAC | | |
| | | | (SEQ ID. NO: 2241) | t (SEQ | (SEQ ID. | | |
| | | | | ID. NO: | NO: 2243) | | |
| | | | | 2242) | | | |
| 7a | ssrna1_48 | CcaCas13b | atgattacgccaagcttgcatgcct | atgattacgc | GTTGGAACTGCT | ssRNA1 | 7a |
| | | | gcaggGTTGGAACTGCTCTCATTTT | caagcttgca | CTCATTTTGGAGG | | |
| | | | GGAGGGTAATCACAAC | tgcctgcag | GTAATCACAAC | | |
| | | | (SEQ ID. NO: 2244) | g (SEQ | (SEQ ID. | | |
| | | | | ID. NO: | NO: 2246) | | |
| | | | | 2245) | | | |
| 7a | ssrna1_49 | CcaCas13b | catgattacgccaagcttgcatgcc | catgattacg | GTTGGAACTGCT | ssRNA1 | 7a |
| | | | tgcagGTTGGAACTGCTCTCATTTT | ccaagcttgc | CTCATTTTGGAGG | | |
| | | | GGAGGGTAATCACAAC | atgcctgca | GTAATCACAAC | | |
| | | | (SEQ ID. NO: 2247) | g (SEQ | (SEQ ID. | | |
| | | | | ID. NO: | NO: 2249) | | |
| | | | | 2248) | | | |
| 7a | ssrna1_50 | CcaCas13b | accatgattacgccaagcttgcatg | accatgatta | GTTGGAACTGCT | ssRNA1 | 7a |
| | | | cctgcGTTGGAACTGCTCTCATTTT | cgccaagctt | CTCATTTTGGAGG | | |
| | | | GGAGGGTAATCACAAC | gcatgcctg | GTAATCACAAC | | |
| | | | (SEQ ID. NO: 2250) | c (SEQ | (SEQ ID. | | |
| | | | | ID. NO: | NO: 2252) | | |
| | | | | 2251) | | | |
| 7a | ssrna1_51 | CcaCas13b | gaccatgattacgccaagcttgcat | gaccatgatt | GTTGGAACTGCT | ssRNA1 | 7a |
| | | | gcctgGTTGGAACTGCTCTCATTTT | acgccaagc | CTCATTTTGGAGG | | |
| | | | GGAGGGTAATCACAAC | ttgcatgcct | GTAATCACAAC | | |
| | | | (SEQ ID. NO: 2253) | g (SEQ | (SEQ ID. | | |
| | | | | ID. NO: | NO: 2255) | | |
| | | | | 2254) | | | |
| 7a | ssrna1_52 | CcaCas13b | tgaccatgattacgccaagcttgca | tgaccatgat | GTTGGAACTGCT | ssRNA1 | 7a |
| | | | tgcctGTTGGAACTGCTCTCATTTT | tacgccaag | CTCATTTTGGAGG | | |
| | | | GGAGGGTAATCACAAC | cttgcatgcc | GTAATCACAAC | | |
| | | | (SEQ ID. NO: 2256) | t (SEQ | (SEQ ID. | | |
| | | | | ID. NO: | NO: 2258) | | |
| | | | | 2257) | | | |
| 7a | ssrna1_53 | CcaCas13b | atgaccatgattacgccaagcttgc | atgaccatga | GTTGGAACTGCT | ssRNA1 | 7a |
| | | | atgccGTTGGAACTGCTCTCATTTT | ttacgccaag | CTCATTTTGGAGG | | |
| | | | GGAGGGTAATCACAAC | cttgcatgcc | GTAATCACAAC | | |
| | | | (SEQ ID. NO: 2259) | (SEQ ID. | (SEQ ID. | | |
| | | | | NO: | NO: 2261) | | |
| | | | | 2260) | | | |
| 7a | ssrna1_54 | CcaCas13b | ctatgaccatgattacgccaagctt | ctatgaccat | GTTGGAACTGCT | ssRNA1 | 7a |
| | | | gcatgGTTGGAACTGCTCTCATTTT | gattacgcca | CTCATTTTGGAGG | | |
| | | | GGAGGGTAATCACAAC | agcttgcatg | GTAATCACAAC | | |
| | | | (SEQ ID. NO: 2262) | (SEQ ID. | (SEQ ID. | | |
| | | | | NO: | NO: 2264) | | |
| | | | | 2263) | | | |
| 7a | ssrna1_55 | CcaCas13b | gctatgaccatgattacgccaagct | gctatgacca | GTTGGAACTGCT | ssRNA1 | 7a |
| | | | tgcatGTTGGAACTGCTCTCATTTT | tgattacgcc | CTCATTTTGGAGG | | |
| | | | GGAGGGTAATCACAAC | aagcttgcat | GTAATCACAAC | | |
| | | | (SEQ ID. NO: 2265) | (SEQ ID. | (SEQ ID. | | |
| | | | | NO: | NO: 2267) | | |
| | | | | 2266) | | | |
| 7a | ssrna1_56 | CcaCas13b | acagctatgaccatgattacgccaa | acagctatga | GTTGGAACTGCT | ssRNA1 | 7a |
| | | | gcttgGTTGGAACTGCTCTCATTTT | ccatgattac | CTCATTTTGGAGG | | |
| | | | GGAGGGTAATCACAAC | gccaagctt | GTAATCACAAC | | |
| | | | (SEQ ID. NO: 2268) | g (SEQ | (SEQ ID. | | |
| | | | | ID. NO: | NO: 2270) | | |
| | | | | 2269) | | | |
| 7a | ssrna1_57 | CcaCas13b | aacagctatgaccatgattacgcca | aacagctatg | GTTGGAACTGCT | ssRNA1 | 7a |
| | | | agcttGTTGGAACTGCTCTCATTTT | accatgatta | CTCATTTTGGAGG | | |
| | | | GGAGGGTAATCACAAC | cgccaagctt | GTAATCACAAC | | |
| | | | (SEQ ID. NO: 2271) | (SEQ ID. | (SEQ ID. | | |
| | | | | NO: | NO: 2273) | | |
| | | | | 2272) | | | |
| 7a | ssrna1_58 | CcaCas13b | aaacagctatgaccatgattacgcc | aaacagctat | GTTGGAACTGCT | ssRNA1 | 7a |
| | | | aagctGTTGGAACTGCTCTCATTTT | gaccatgatt | CTCATTTTGGAGG | | |
| | | | GGAGGGTAATCACAAC | acgccaagc | GTAATCACAAC | | |
| | | | (SEQ ID. NO: 2274) | t (SEQ | (SEQ ID. | | |
| | | | | ID. NO: | NO: 2276) | | |
| | | | | 2275) | | | |
| 7a | ssrna1_59 | CcaCas13b | gaaacagctatgaccatgattacgc | gaaacagct | GTTGGAACTGCT | ssRNA1 | 7a |
| | | | caagcGTTGGAACTGCTCTCATTTT | atgaccatga | CTCATTTTGGAGG | | |
| | | | GGAGGGTAATCACAAC | ttacgccaag | GTAATCACAAC | | |
| | | | (SEQ ID. NO: 2277) | c (SEQ | (SEQ ID. | | |
| | | | | ID. NO: | NO: 2279) | | |
| | | | | 2278) | | | |
| 7a | ssrna1_60 | CcaCas13b | caggaaacagctatgaccatgatta | caggaaaca | GTTGGAACTGCT | ssRNA1 | 7a |
| | | | cgccaGTTGGAACTGCTCTCATTTT | gctatgacca | CTCATTTTGGAGG | | |
| | | | GGAGGGTAATCACAAC | tgattacgcc | GTAATCACAAC | | |
| | | | (SEQ ID. NO: 2280) | a (SEQ | (SEQ ID. | | |
| | | | | ID. NO: | NO: 2282) | | |
| | | | | 2281) | | | |
| 7a | ssrna1_61 | CcaCas13b | acaggaaacagctatgaccatgatt | acaggaaac | GTTGGAACTGCT | ssRNA1 | 7a |
| | | | acgccGTTGGAACTGCTCTCATTTT | agctatgacc | CTCATTTTGGAGG | | |
| | | | GGAGGGTAATCACAAC | atgattacgc | GTAATCACAAC | | |
| | | | (SEQ ID. NO: 2283) | c (SEQ | (SEQ ID. | | |
| | | | | ID. NO: | NO: 2285) | | |
| | | | | 2284) | | | |
| 7a | ssrna1_62 | CcaCas13b | cacaggaaacagctatgaccatgat | cacaggaaa | GTTGGAACTGCT | ssRNA1 | 7a |
| | | | tacgcGTTGGAACTGCTCTCATTTT | cagctatgac | CTCATTTTGGAGG | | |
| | | | GGAGGGTAATCACAAC | catgattacg | GTAATCACAAC | | |
| | | | (SEQ ID. NO: 2286) | c (SEQ | (SEQ ID. | | |
| | | | | ID. NO: | NO: 2288) | | |
| | | | | 2287) | | | |
| 7a | ssrna1_63 | CcaCas13b | taaacacaggaaacagctatgacca | taaacacag | GTTGGAACTGCT | ssRNA1 | 7a |
| | | | tgattGTTGGAACTGCTCTCATTTT | gaaacagct | CTCATTTTGGAGG | | |
| | | | GGAGGGTAATCACAAC | atgaccatga | GTAATCACAAC | | |
| | | | (SEQ ID. NO: 2289) | tt (SEQ | (SEQ ID. | | |
| | | | | ID. NO: | NO: 2291) | | |
| | | | | 2290) | | | |
| 7a | ssrna1_64 | CcaCas13b | gataaacacaggaaacagctatgac | gataaacac | GTTGGAACTGCT | ssRNA1 | 7a |
| | | | catgaGTTGGAACTGCTCTCATTTT | aggaaacag | CTCATTTTGGAGG | | |
| | | | GGAGGGTAATCACAAC | ctatgaccat | GTAATCACAAC | | |
| | | | (SEQ ID. NO: 2292) | ga (SEQ | (SEQ ID. | | |
| | | | | ID. NO: | NO: 2294) | | |
| | | | | 2293) | | | |
| 7a | ssrna1_65 | CcaCas13b | ggataaacacaggaaacagctatga | ggataaaca | GTTGGAACTGCT | ssRNA1 | 7a |
| | | | ccatgGTTGGAACTGCTCTCATTTT | caggaaaca | CTCATTTTGGAGG | | |
| | | | GGAGGGTAATCACAAC | gctatgacca | GTAATCACAAC | | |
| | | | (SEQ ID. NO: 2295) | tg (SEQ | (SEQ ID. | | |
| | | | | ID. NO: | NO: 2297) | | |
| | | | | 2296) | | | |
| 7a | ssrna1_66 | CcaCas13b | cggataaacacaggaaacagctatg | cggataaac | GTTGGAACTGCT | ssRNA1 | 7a |
| | | | accatGTTGGAACTGCTCTCATTTT | acaggaaac | CTCATTTTGGAGG | | |
| | | | GGAGGGTAATCACAAC | agctatgacc | GTAATCACAAC | | |
| | | | (SEQ ID. NO: 2298) | at (SEQ | (SEQ ID. | | |
| | | | | ID. NO: | NO: 2300) | | |
| | | | | 2299) | | | |
| 7a | ssrna1_67 | CcaCas13b | gcggataaacacaggaaacagctat | gcggataaa | GTTGGAACTGCT | ssRNA1 | 7a |
| | | | gaccaGTTGGAACTGCTCTCATTTT | cacaggaaa | CTCATTTTGGAGG | | |
| | | | GGAGGGTAATCACAAC | cagctatgac | GTAATCACAAC | | |
| | | | (SEQ ID. NO: 2301) | ca (SEQ | (SEQ ID. | | |
| | | | | ID. NO: | NO: 2303) | | |
| | | | | 2302) | | | |
| 7a | ssrna1_68 | CcaCas13b | agcggataaacacaggaaacagcta | agcggataa | GTTGGAACTGCT | ssRNA1 | 7a |
| | | | tgaccGTTGGAACTGCTCTCATTTT | acacaggaa | CTCATTTTGGAGG | | |
| | | | GGAGGGTAATCACAAC | acagctatga | GTAATCACAAC | | |
| | | | (SEQ ID. NO: 2304) | cc (SEQ | (SEQ ID. | | |
| | | | | ID. NO: | NO: 2306) | | |
| | | | | 2305) | | | |
| 7a | ssrna1_69 | CcaCas13b | gagcggataaacacaggaaacagct | gageggata | GTTGGAACTGCT | ssRNA1 | 7a |
| | | | atgacGTTGGAACTGCTCTCATTT | aacacagga | CTCATTTTGGAGG | | |
| | | | TGGAGGGTAATCACAAC | aacagctatg | GTAATCACAAC | | |
| | | | (SEQ ID. NO: 2307) | ac (SEQ | (SEQ ID. | | |
| | | | | ID. NO: | NO: 2309) | | |
| | | | | 2308) | | | |
| 7a | ssrna1_70 | CcaCas13b | tgagcggataaacacaggaaacagc | tgagcggat | GTTGGAACTGCT | ssRNA1 | 7a |
| | | | tatgaGTTGGAACTGCTCTCATTTT | aaacacagg | CTCATTTTGGAGG | | |
| | | | GGAGGGTAATCACAAC | aaacagctat | GTAATCACAAC | | |
| | | | (SEQ ID. NO: 2310) | ga (SEQ | (SEQ ID. | | |
| | | | | ID. NO: | NO: 2312) | | |
| | | | | 2311) | | | |
| 7a | ssrna1_71 | CcaCas13b | tgtgagcggataaacacaggaaaca | tgtgagcgg | GTTGGAACTGCT | ssRNA1 | 7a |
| | | | gctatGTTGGAACTGCTCTCATTTT | ataaacaca | CTCATTTTGGAGG | | |
| | | | GGAGGGTAATCACAAC | ggaaacagc | GTAATCACAAC | | |
| | | | (SEQ ID. NO: 2313) | tat (SEQ | (SEQ ID. | | |
| | | | | ID. NO: | NO: 2315) | | |
| | | | | 2314) | | | |
| 7a | ssrna1_72 | CcaCas13b | attgtgagcggataaacacaggaaa | attgtgagcg | GTTGGAACTGCT | ssRNA1 | 7a |
| | | | cagctGTTGGAACTGCTCTCATTTT | gataaacac | CTCATTTTGGAGG | | |
| | | | GGAGGGTAATCACAAC | aggaaacag | GTAATCACAAC | | |
| | | | (SEQ ID. NO: 2316) | ct (SEQ | (SEQ ID. | | |
| | | | | ID. NO: | NO: 2318) | | |
| | | | | 2317) | | | |
| 7a | ssrna1_73 | CcaCas13b | aattgtgagcggataaacacaggaa | aattgtgagc | GTTGGAACTGCT | ssRNA1 | 7a |
| | | | cagcGTTGGAACTGCTCTCATTTT | ggataaaca | CTCATTTTGGAGG | | |
| | | | GGAGGGTAATCACAAC | caggaaaca | GTAATCACAAC | | |
| | | | (SEQ ID. NO: 2319) | gc (SEQ | (SEQ ID. | | |
| | | | | ID. NO: | NO: 2321) | | |
| | | | | 2320) | | | |
| 7a | ssrna1_74 | CcaCas13b | gaattgtgagcggataaacacagga | gaattgtgag | GTTGGAACTGCT | ssRNA1 | 7a |
| | | | aacagGTTGGAACTGCTCTCATTTT | cggataaac | CTCATTTTGGAGG | | |
| | | | GGAGGGTAATCACAAC | acaggaaac | GTAATCACAAC | | |
| | | | (SEQ ID. NO: 2322) | ag (SEQ | (SEQ ID. | | |
| | | | | ID. NO: | NO: 2324) | | |
| | | | | 2323) | | | |
| 7a | ssrna1_75 | CcaCas13b | gtggaattgtgagcggataaacaca | gtggaattgt | GTTGGAACTGCT | ssRNA1 | 7a |
| | | | ggaaaGTTGGAACTGCTCTCATTTT | gagcggata | CTCATTTTGGAGG | | |
| | | | GGAGGGTAATCACAAC | aacacagga | GTAATCACAAC | | |
| | | | (SEQ ID. NO: 2325) | aa (SEQ | (SEQ ID. | | |
| | | | | ID. NO: | NO: 2327) | | |
| | | | | 2326) | | | |
| 7a | ssrna1_76 | CcaCas13b | tgtggaattgtgagcggataaacac | tgtggaattg | GTTGGAACTGCT | ssRNA1 | 7a |
| | | | aggaaGTTGGAACTGCTCTCATTTT | tgagcggat | CTCATTTTGGAGG | | |
| | | | GGAGGGTAATCACAAC | aaacacagg | GTAATCACAAC | | |
| | | | (SEQ ID. NO: 2328) | aa (SEQ | (SEQ ID. | | |
| | | | | ID. NO: | NO: 2330) | | |
| | | | | 2329) | | | |
| 7a | ssrna1_77 | CcaCas13b | gtgtggaattgtgagcggataaaca | gtgtggaatt | GTTGGAACTGCT | ssRNA1 | 7a |
| | | | caggaGTTGGAACTGCTCTCATTTT | gtgagcgga | CTCATTTTGGAGG | | |
| | | | GGAGGGTAATCACAAC | taaacacag | GTAATCACAAC | | |
| | | | (SEQ ID. NO: 2331) | ga (SEQ | (SEQ ID. | | |
| | | | | ID. NO: | NO: 2333) | | |
| | | | | 2332) | | | |
| 7a | ssrna1_78 | CcaCas13b | tgtgtggaattgtgagcggataaac | tgtgtggaat | GTTGGAACTGCT | ssRNA1 | 7a |
| | | | acaggGTTGGAACTGCTCTCATTTT | tgtgagcgg | CTCATTTTGGAGG | | |
| | | | GGAGGGTAATCACAAC | ataaacaca | GTAATCACAAC | | |
| | | | (SEQ ID. NO: 2334) | gg (SEQ | (SEQ ID. | | |
| | | | | ID. NO: | NO: 2336) | | |
| | | | | 2335) | | | |
| 7a | ssrna1_79 | CcaCas13b | gttgtgtggaattgtgagcggataa | gttgtgtgga | GTTGGAACTGCT | ssRNA1 | 7a |
| | | | acacaGTTGGAACTGCTCTCATTTT | attgtgagcg | CTCATTTTGGAGG | | |
| | | | GGAGGGTAATCACAAC | gataaacac | GTAATCACAAC | | |
| | | | (SEQ ID. NO: 2337) | a (SEQ | (SEQ ID. | | |
| | | | | ID. NO: | NO: 2339) | | |
| | | | | 2338) | | | |
| 7a | ssrna1_80 | CcaCas13b | tgttgtgtggaattgtgagcggata | tgttgtgtgg | GTTGGAACTGCT | ssRNA1 | 7a |
| | | | aacacGTTGGAACTGCTCTCATTTT | aattgtgagc | CTCATTTTGGAGG | | |
| | | | GGAGGGTAATCACAAC | ggataaaca | GTAATCACAAC | | |
| | | | (SEQ ID. NO: 2340) | c (SEQ | (SEQ ID. | | |
| | | | | ID. NO: | NO: 2342) | | |
| | | | | 2341) | | | |
| 7a | ssrna1_81 | CcaCas13b | atgttgtgtggaattgtgagcggat | atgttgtgtg | GTTGGAACTGCT | ssRNA1 | 7a |
| | | | aaacaGTTGGAACTGCTCTCATTTT | gaattgtgag | CTCATTTTGGAGG | | |
| | | | GGAGGGTAATCACAAC | cggataaac | GTAATCACAAC | | |
| | | | (SEQ ID. NO: 2343) | a (SEQ | (SEQ ID. | | |
| | | | | ID. NO: | NO: 2345) | | |
| | | | | 2344) | | | |
| 7a | ssrna1_82 | CcaCas13b | gtatgttgtgtggaattgtgagcgg | gtatgttgtgt | GTTGGAACTGCT | ssRNA1 | 7a |
| | | | ataaaGTTGGAACTGCTCTCATTTT | ggaattgtga | CTCATTTTGGAGG | | |
| | | | GGAGGGTAATCACAAC | gcggataaa | GTAATCACAAC | | |
| | | | (SEQ ID. NO: 2346) | (SEQ ID. | (SEQ ID. | | |
| | | | | NO: | NO: 2348) | | |
| | | | | 2347) | | | |
| 7a | ssrna1_83 | CcaCas13b | cgtatgttgtgtggaattgtgagcg | cgtatgttgt | GTTGGAACTGCT | ssRNA1 | 7a |
| | | | gataaGTTGGAACTGCTCTCATTTT | gtggaattgt | CTCATTTTGGAGG | | |
| | | | GGAGGGTAATCACAAC | gagcggata | GTAATCACAAC | | |
| | | | (SEQ ID. NO: 2349) | a (SEQ | (SEQ ID. | | |
| | | | | ID. NO: | NO: 2351) | | |
| | | | | 2350) | | | |
| 7a | ssrna1_84 | CcaCas13b | tcgtatgttgtgtggaattgtgagc | tcgtatgttgt | GTTGGAACTGCT | ssRNA1 | 7a |
| | | | ggataGTTGGAACTGCTCTCATTTT | gtggaattgt | CTCATTTTGGAGG | | |
| | | | GGAGGGTAATCACAAC | gagcggata | GTAATCACAAC | | |
| | | | (SEQ ID. NO: 2352) | (SEQ ID. | (SEQ ID. | | |
| | | | | NO: | NO: 2354) | | |
| | | | | 2353) | | | |
| 7a | ssrna1_85 | CcaCas13b | gctcgtatgttgtgtggaattgtga | gctcgtatgtt | GTTGGAACTGCT | ssRNA1 | 7a |
| | | | gcggaGTTGGAACTGCTCTCATTTT | gtgtggaatt | CTCATTTTGGAGG | | |
| | | | GGAGGGTAATCACAAC | gtgagcgga | GTAATCACAAC | | |
| | | | (SEQ ID. NO: 2355) | (SEQ ID. | (SEQ ID. | | |
| | | | | NO: | NO: 2357) | | |
| | | | | 2356) | | | |
| 7a | ssrna1_86 | CcaCas13b | ggctcgtatgttgtgtggaattgtg | ggctcgtatg | GTTGGAACTGCT | ssRNA1 | 7a |
| | | | agcggGTTGGAACTGCTCTCATTTT | ttgtgtggaa | CTCATTTTGGAGG | | |
| | | | GGAGGGTAATCACAAC | ttgtgagcgg | GTAATCACAAC | | |
| | | | (SEQ ID. NO: 2358) | (SEQ ID. | (SEQ ID. | | |
| | | | | NO: | NO: 2360) | | |
| | | | | 2359) | | | |
| 7a | ssrna1_87 | CcaCas13b | ccggctcgtatgttgtgtggaattg | ccggctcgt | GTTGGAACTGCT | ssRNA1 | 7a |
| | | | tgagcGTTGGAACTGCTCTCATTTT | atgttgtgtg | CTCATTTTGGAGG | | |
| | | | GGAGGGTAATCACAAC | gaattgtgag | GTAATCACAAC | | |
| | | | (SEQ ID. NO: 2361) | c (SEQ | (SEQ ID. | | |
| | | | | ID. NO: | NO: 2363) | | |
| | | | | 2362) | | | |
| 7a | ssrna1_88 | CcaCas13b | tccggctcgtatgttgtgtggaatt | tccggctcgt | GTTGGAACTGCT | ssRNA1 | 7a |
| | | | gtgagGTTGGAACTGCTCTCATTTT | atgttgtgtg | CTCATTTTGGAGG | | |
| | | | GGAGGGTAATCACAAC | gaattgtgag | GTAATCACAAC | | |
| | | | (SEQ ID. NO: 2364) | (SEQ ID. | (SEQ ID. | | |
| | | | | NO: | NO: 2366) | | |
| | | | | 2365) | | | |
| 7a | ssrna1_89 | CcaCas13b | ttccggctcgtatgttgtgtggaat | ttccggctcg | GTTGGAACTGCT | ssRNA1 | 7a |
| | | | tgtgaGTTGGAACTGCTCTCATTTT | tatgttgtgtg | CTCATTTTGGAGG | | |
| | | | GGAGGGTAATCACAAC | gaattgtga | GTAATCACAAC | | |
| | | | (SEQ ID. NO: 2367) | (SEQ ID. | (SEQ ID. | | |
| | | | | NO: | NO: 2369) | | |
| | | | | 2368) | | | |
| 7a | ssrna1_90 | CcaCas13b | gcttccggctcgtatgttgtgtgga | gcttccggct | GTTGGAACTGCT | ssRNA1 | 7a |
| | | | attgtGTTGGAACTGCTCTCATTTT | cgtatgttgt | CTCATTTTGGAGG | | |
| | | | GGAGGGTAATCACAAC | gtggaattgt | GTAATCACAAC | | |
| | | | (SEQ ID. NO: 2370) | (SEQ ID. | (SEQ ID. | | |
| | | | | NO: | NO: 2372) | | |
| | | | | 2371) | | | |
| 7a | ssrna1_91 | CcaCas13b | tgcttccggctcgtatgttgtgtgg | tgcttccggc | GTTGGAACTGCT | ssRNA1 | 7a |
| | | | aattgGTTGGAACTGCTCTCATTTT | tcgtatgttgt | CTCATTTTGGAGG | | |
| | | | GGAGGGTAATCACAAC | gtggaattg | GTAATCACAAC | | |
| | | | (SEQ ID. NO: 2373) | (SEQ ID. | (SEQ ID. | | |
| | | | | NO: | NO: 2375) | | |
| | | | | 2374) | | | |
| 7a | ssrna1_92 | CcaCas13b | atgcttccggctcgtatgttgtgtg | atgcttccgg | GTTGGAACTGCT | ssRNA1 | 7a |
| | | | gaattGTTGGAACTGCTCTCATTTT | ctcgtatgttg | CTCATTTTGGAGG | | |
| | | | GGAGGGTAATCACAAC | tgtggaatt | GTAATCACAAC | | |
| | | | (SEQ ID. NO: 2376) | (SEQ ID. | (SEQ ID. | | |
| | | | | NO: | NO: 2378) | | |
| | | | | 2377) | | | |
| 7a | ssrna1_93 | CcaCas13b | ttatgcttccggctcgtatgttgtg | ttatgcttccg | GTTGGAACTGCT | ssRNA1 | 7a |
| | | | tggaaGTTGGAACTGCTCTCATTTT | gctcgtatgtt | CTCATTTTGGAGG | | |
| | | | GGAGGGTAATCACAAC | gtgtggaa | GTAATCACAAC | | |
| | | | (SEQ ID. NO: 2379) | (SEQ ID. | (SEQ ID. | | |
| | | | | NO: | NO: 2381) | | |
| | | | | 2380) | | | |
| 7a | ssrna1_94 | CcaCas13b | tttatgcttccggctcgtatgttgt | tttatgcttcc | GTTGGAACTGCT | ssRNA1 | 7a |
| | | | gtggaGTTGGAACTGCTCTCATTTT | ggctcgtatg | CTCATTTTGGAGG | | |
| | | | GGAGGGTAATCACAAC | ttgtgtgga | GTAATCACAAC | | |
| | | | (SEQ ID. NO: 2382) | (SEQ ID. | (SEQ ID. | | |
| | | | | NO: | NO: 2384) | | |
| | | | | 2383) | | | |
| 1b | ebola_0 | CcaCas13b | aactgtgaaagacaactcttcactg | aactgtgaaa | GTTGGAACTGCT | Ebola | 1b |
| | | | cgaatGTTGGAACTGCTCTCATTT | gacaactctt | CTCATTTTGGAGG | ssRNA | |
| | | | TGGAGGGTAATCACAAC | cactgcgaat | GTAATCACAAC | | |
| | | | (SEQ ID. NO: 2385) | (SEQ ID. | (SEQ ID. | | |
| | | | | NO: | NO: 2387) | | |
| | | | | 2386) | | | |
| 1b | ebola_1 | CcaCas13b | caactgtgaaagacaactcttcact | caactgtgaa | GTTGGAACTGCT | Ebola | 1b |
| | | | gcgaaGTTGGAACTGCTCTCATTTT | agacaactct | CTCATTTTGGAGG | ssRNA | |
| | | | GGAGGGTAATCACAAC | tcactgcgaa | GTAATCACAAC | | |
| | | | (SEQ ID. NO: 2388) | (SEQ ID. | (SEQ ID. | | |
| | | | | NO: | NO: 2390) | | |
| | | | | 2389) | | | |
| 1b | ebola_2 | CcaCas13b | acaactgtgaaagacaactcttcac | acaactgtga | GTTGGAACTGCT | Ebola | 1b |
| | | | tgcgaGTTGGAACTGCTCTCATTTT | aagacaact | CTCATTTTGGAGG | ssRNA | |
| | | | GGAGGGTAATCACAAC | cttcactgcg | GTAATCACAAC | | |
| | | | (SEQ ID. NO: 2391) | a (SEQ | (SEQ ID. | | |
| | | | | ID. NO: | NO: 2393) | | |
| | | | | 2392) | | | |
| 1b | ebola_3 | CcaCas13b | atacaactgtgaaagacaactcttc | atacaactgt | GTTGGAACTGCT | Ebola | 1b |
| | | | actgcGTTGGAACTGCTCTCATTTT | gaaagacaa | CTCATTTTGGAGG | ssRNA | |
| | | | GGAGGGTAATCACAAC | ctcttcactg | GTAATCACAAC | | |
| | | | (SEQ ID. NO: 2394) | c (SEQ | (SEQ ID. | | |
| | | | | ID. NO: | NO: 2396) | | |
| | | | | 2395) | | | |
| 1b | ebola_4 | CcaCas13b | gatacaactgtgaaagacaactctt | gatacaactg | GTTGGAACTGCT | Ebola | 1b |
| | | | cactgGTTGGAACTGCTCTCATTTT | tgaaagaca | CTCATTTTGGAGG | ssRNA | |
| | | | GGAGGGTAATCACAAC | actcttcact | GTAATCACAAC | | |
| | | | (SEQ ID. NO: 2397) | g (SEQ | (SEQ ID. | | |
| | | | | ID. NO: | NO: 2399) | | |
| | | | | 2398) | | | |
| 1b | ebola_5 | CcaCas13b | ttgatacaactgtgaaagacaactc | ttgatacaac | GTTGGAACTGCT | Ebola | 1b |
| | | | ttcacGTTGGAACTGCTCTCATTTT | tgtgaaaga | CTCATTTTGGAGG | ssRNA | |
| | | | GGAGGGTAATCACAAC | caactcttca | GTAATCACAAC | | |
| | | | (SEQ ID. NO: 2400) | c (SEQ | (SEQ ID. | | |
| | | | | ID. NO: | NO: 2402) | | |
| | | | | 2401) | | | |
| 1b | ebola_6 | CcaCas13b | tttgatacaactgtgaaagacaact | tttgatacaa | GTTGGAACTGCT | Ebola | 1b |
| | | | cttcaGTTGGAACTGCTCTCATTTT | ctgtgaaag | CTCATTTTGGAGG | ssRNA | |
| | | | GGAGGGTAATCACAAC | acaactcttc | GTAATCACAAC | | |
| | | | (SEQ ID. NO: 2403) | a (SEQ | (SEQ ID. | | |
| | | | | ID. NO: | NO: 2405) | | |
| | | | | 2404) | | | |
| 1b | ebola_7 | CcaCas13b | cgtttgatacaactgtgaaagacaa | cgtttgatac | GTTGGAACTGCT | Ebola | 1b |
| | | | ctcttGTTGGAACTGCTCTCATTTT | aactgtgaaa | CTCATTTTGGAGG | ssRNA | |
| | | | GGAGGGTAATCACAAC | gacaactctt | GTAATCACAAC | | |
| | | | (SEQ ID. NO: 2406) | (SEQ ID. | (SEQ ID. | | |
| | | | | NO: | NO: 2408) | | |
| | | | | 2407) | | | |
| 1b | ebola_8 | CcaCas13b | ccgtttgatacaactgtgaaagaca | ccgtttgata | GTTGGAACTGCT | Ebola | 1b |
| | | | actctGTTGGAACTGCTCTCATTTT | caactgtgaa | CTCATTTTGGAGG | ssRNA | |
| | | | GGAGGGTAATCACAAC | agacaactct | GTAATCACAAC | | |
| | | | (SEQ ID. NO: 2409) | (SEQ ID. | (SEQ ID. | | |
| | | | | NO: | NO: 2411) | | |
| | | | | 2410) | | | |
| 1b | ebola_9 | CcaCas13b | ctccgtttgatacaactgtgaaaga | ctccgtttgat | GTTGGAACTGCT | Ebola | 1b |
| | | | caactGTTGGAACTGCTCTCATTTT | acaactgtga | CTCATTTTGGAGG | ssRNA | |
| | | | GGAGGGTAATCACAAC | aagacaact | GTAATCACAAC | | |
| | | | (SEQ ID. NO: 2412) | (SEQ ID. | (SEQ ID. | | |
| | | | | NO: | NO: 2414) | | |
| | | | | 2413) | | | |
| 1b | ebola_10 | CcaCas13b | gctccgtttgatacaactgtgaaag | gctccgtttg | GTTGGAACTGCT | Ebola | 1b |
| | | | acaacGTTGGAACTGCTCTCATTTT | atacaactgt | CTCATTTTGGAGG | ssRNA | |
| | | | GGAGGGTAATCACAAC | gaaagacaa | GTAATCACAAC | | |
| | | | (SEQ ID. NO: 2415) | c (SEQ | (SEQ ID. | | |
| | | | | ID. NO: | NO: 2417) | | |
| | | | | 2416) | | | |
| 1b | ebola_11 | CcaCas13b | tggctccgtttgatacaactgtgaa | tggctccgttt | GTTGGAACTGCT | Ebola | 1b |
| | | | agacaGTTGGAACTGCTCTCATTTT | gatacaactg | CTCATTTTGGAGG | ssRNA | |
| | | | GGAGGGTAATCACAAC | tgaaagaca | GTAATCACAAC | | |
| | | | (SEQ ID. NO: 2418) | (SEQ ID. | (SEQ ID. | | |
| | | | | NO: | NO: 2420) | | |
| | | | | 2419) | | | |
| 1b | ebola_12 | CcaCas13b | ttggctccgtttgatacaactgtga | ttggctccgtt | GTTGGAACTGCT | Ebola | 1b |
| | | | aagacGTTGGAACTGCTCTCATTTT | tgatacaact | CTCATTTTGGAGG | ssRNA | |
| | | | GGAGGGTAATCACAAC | gtgaaagac | GTAATCACAAC | | |
| | | | (SEQ ID. NO: 2421) | (SEQ ID. | (SEQ ID. | | |
| | | | | NO: | NO: 2423) | | |
| | | | | 2422) | | | |
| 1b | ebola_13 | CcaCas13b | tttggctccgtttgatacaactgtg | tttggctccgt | GTTGGAACTGCT | Ebola | 1b |
| | | | aaagaGTTGGAACTGCTCTCATTTT | ttgatacaac | CTCATTTTGGAGG | ssRNA | |
| | | | GGAGGGTAATCACAAC | tgtgaaaga | GTAATCACAAC | | |
| | | | (SEQ ID. NO: 2424) | (SEQ ID. | (SEQ ID. | | |
| | | | | NO: | NO: 2426) | | |
| | | | | 2425) | | | |
| 1b | ebola_14 | CcaCas13b | tttttggctccgtttgatacaactg | tttttggctcc | GTTGGAACTGCT | Ebola | 1b |
| | | | tgaaaGTTGGAACTGCTCTCATTTT | gtttgataca | CTCATTTTGGAGG | ssRNA | |
| | | | GGAGGGTAATCACAAC | actgtgaaa | GTAATCACAAC | | |
| | | | (SEQ ID. NO: 2427) | (SEQ ID. | (SEQ ID. | | |
| | | | | NO: | NO: 2429) | | |
| | | | | 2428) | | | |
| 1b | ebola_15 | CcaCas13b | gatgtttttggctccgtttgataca | gatgtttttgg | GTTGGAACTGCT | Ebola | 1b |
| | | | actgtGTTGGAACTGCTCTCATTTT | ctccgtttgat | CTCATTTTGGAGG | ssRNA | |
| | | | GGAGGGTAATCACAAC | acaactgt | GTAATCACAAC | | |
| | | | (SEQ ID. NO: 2430) | (SEQ ID. | (SEQ ID. | | |
| | | | | NO: | NO: 2432) | | |
| | | | | 2431) | | | |
| 1b | ebola_16 | CcaCas13b | tgatgtttttggctccgtttgatac | tgatgtttttg | GTTGGAACTGCT | Ebola | 1b |
| | | | aactgGTTGGAACTGCTCTCATTTT | gctccgtttg | CTCATTTTGGAGG | ssRNA | |
| | | | GGAGGGTAATCACAAC | atacaactg | GTAATCACAAC | | |
| | | | (SEQ ID. NO: 2433) | (SEQ ID. | (SEQ ID. | | |
| | | | | NO: | NO: 2435) | | |
| | | | | 2434) | | | |
| 1b | ebola_17 | CcaCas13b | ctgatgtttttggctccgtttgata | ctgatgttttt | GTTGGAACTGCT | Ebola | 1b |
| | | | caactGTTGGAACTGCTCTCATTTT | ggctccgttt | CTCATTTTGGAGG | ssRNA | |
| | | | GGAGGGTAATCACAAC | gatacaact | GTAATCACAAC | | |
| | | | (SEQ ID. NO: 2436) | (SEQ ID. | (SEQ ID. | | |
| | | | | NO: | NO: 2438) | | |
| | | | | 2437) | | | |
| 1b | ebola_18 | CcaCas13b | actgatgtttttggctccgtttgat | actgatgtttt | GTTGGAACTGCT | Ebola | 1b |
| | | | acaacGTTGGAACTGCTCTCATTTT | tggctccgttt | CTCATTTTGGAGG | ssRNA | |
| | | | GGAGGGTAATCACAAC | gatacaac | GTAATCACAAC | | |
| | | | (SEQ ID. NO: 2439) | (SEQ ID. | (SEQ ID. | | |
| | | | | NO: | NO: 2441) | | |
| | | | | 2440) | | | |
| 1b | ebola_19 | CcaCas13b | gaccactgatgtttttggctccgtt | gaccactgat | GTTGGAACTGCT | Ebola | 1b |
| | | | tgataGTTGGAACTGCTCTCATTTT | gtttttggctc | CTCATTTTGGAGG | ssRNA | |
| | | | GGAGGGTAATCACAAC | cgtttgata | GTAATCACAAC | | |
| | | | (SEQ ID. NO: 2442) | (SEQ ID. | (SEQ ID. | | |
| | | | | NO: | NO: 2444) | | |
| | | | | 2443) | | | |
| 1b | ebola_20 | CcaCas13b | tgaccactgatgtttttggctccgt | tgaccactga | GTTGGAACTGCT | Ebola | 1b |
| | | | ttgatGTTGGAACTGCTCTCATTTT | tgtttttggct | CTCATTTTGGAGG | ssRNA | |
| | | | GGAGGGTAATCACAAC | ccgtttgat | GTAATCACAAC | | |
| | | | (SEQ ID. NO: 2445) | (SEQ ID. | (SEQ ID. | | |
| | | | | NO: | NO: 2447) | | |
| | | | | 2446) | | | |
| 1b | ebola_21 | CcaCas13b | ctgaccactgatgtttttggctccg | ctgaccactg | GTTGGAACTGCT | Ebola | 1b |
| | | | tttgaGTTGGAACTGCTCTCATTTT | atgtttttggc | CTCATTTTGGAGG | ssRNA | |
| | | | GGAGGGTAATCACAAC | tccgtttga | GTAATCACAAC | | |
| | | | (SEQ ID. NO: 2448) | (SEQ ID. | (SEQ ID. | | |
| | | | | NO: | NO: 2450) | | |
| | | | | 2449) | | | |
| 1b | ebola_22 | CcaCas13b | ctctgaccactgatgtttttggctc | ctctgaccac | GTTGGAACTGCT | Ebola | 1b |
| | | | cgtttGTTGGAACTGCTCTCATTTT | tgatgtttttg | CTCATTTTGGAGG | ssRNA | |
| | | | GGAGGGTAATCACAAC | gctccgttt | GTAATCACAAC | | |
| | | | (SEQ ID. NO: 2451) | (SEQ ID. | (SEQ ID. | | |
| | | | | NO: | NO: 2453) | | |
| | | | | 2452) | | | |
| 1b | ebola_23 | CcaCas13b | actctgaccactgatgtttttggct | actctgacca | GTTGGAACTGCT | Ebola | 1b |
| | | | ccgttGTTGGAACTGCTCTCATTTT | ctgatgttttt | CTCATTTTGGAGG | ssRNA | |
| | | | GGAGGGTAATCACAAC | ggctccgtt | GTAATCACAAC | | |
| | | | (SEQ ID. NO: 2454) | (SEQ ID. | (SEQ ID. | | |
| | | | | NO: | NO: 2456) | | |
| | | | | 2455) | | | |
| 1b | ebola_24 | CcaCas13b | gactctgaccactgatgtttttggc | gactctgacc | GTTGGAACTGCT | Ebola | 1b |
| | | | tccgtGTTGGAACTGCTCTCATTTT | actgatgtttt | CTCATTTTGGAGG | ssRNA | |
| | | | GGAGGGTAATCACAAC | tggctccgt | GTAATCACAAC | | |
| | | | (SEQ ID. NO: 2457) | (SEQ ID. | (SEQ ID. | | |
| | | | | NO: | NO: 2459) | | |
| | | | | 2458) | | | |
| 1b | ebola_25 | CcaCas13b | cggactctgaccactgatgtttttg | cggactctg | GTTGGAACTGCT | Ebola | 1b |
| | | | gctccGTTGGAACTGCTCTCATTTT | accactgatg | CTCATTTTGGAGG | ssRNA | |
| | | | GGAGGGTAATCACAAC | tttttggctcc | GTAATCACAAC | | |
| | | | (SEQ ID. NO: 2460) | (SEQ ID. | (SEQ ID. | | |
| | | | | NO: | NO: 2462) | | |
| | | | | 2461) | | | |
| 1b | ebola_26 | CcaCas13b | gccggactctgaccactgatgtttt | gccggactc | GTTGGAACTGCT | Ebola | 1b |
| | | | tggctGTTGGAACTGCTCTCATTTT | tgaccactga | CTCATTTTGGAGG | ssRNA | |
| | | | GGAGGGTAATCACAAC | tgtttttggct | GTAATCACAAC | | |
| | | | (SEQ ID. NO: 2463) | (SEQ ID. | (SEQ ID. | | |
| | | | | NO: | NO: 2465) | | |
| | | | | 2464) | | | |
| 1b | ebola_27 | CcaCas13b | cgccggactctgaccactgatgttt | cgccggact | GTTGGAACTGCT | Ebola | 1b |
| | | | ttggcGTTGGAACTGCTCTCATTTT | ctgaccactg | CTCATTTTGGAGG | ssRNA | |
| | | | GGAGGGTAATCACAAC | atgtttttggc | GTAATCACAAC | | |
| | | | (SEQ ID. NO: 2466) | (SEQ ID. | (SEQ ID. | | |
| | | | | NO: | NO: 2468) | | |
| | | | | 2467) | | | |
| 1b | ebola_28 | CcaCas13b | gcgccggactctgaccactgatgtt | gcgccggac | GTTGGAACTGCT | Ebola | 1b |
| | | | tttggGTTGGAACTGCTCTCATTTT | tctgaccact | CTCATTTTGGAGG | ssRNA | |
| | | | GGAGGGTAATCACAAC | gatgtttttgg | GTAATCACAAC | | |
| | | | (SEQ ID. NO: 2469) | (SEQ ID. | (SEQ ID. | | |
| | | | | NO: | NO: 2471) | | |
| | | | | 2470) | | | |
| 1b | ebola_29 | CcaCas13b | cgcgccggactctgaccactgatgt | cgcgccgga | GTTGGAACTGCT | Ebola | 1b |
| | | | ttttgGTTGGAACTGCTCTCATTTT | ctctgaccac | CTCATTTTGGAGG | ssRNA | |
| | | | GGAGGGTAATCACAAC | tgatgtttttg | GTAATCACAAC | | |
| | | | (SEQ ID. NO: 2472) | (SEQ ID. | (SEQ ID. | | |
| | | | | NO: | NO: 2474) | | |
| | | | | 2473) | | | |
| 1b | ebola_30 | CcaCas13b | ttcgcgccggactctgaccactgat | ttcgcgccg | GTTGGAACTGCT | Ebola | 1b |
| | | | gttttGTTGGAACTGCTCTCATTTT | gactctgacc | CTCATTTTGGAGG | ssRNA | |
| | | | GGAGGGTAATCACAAC | actgatgtttt | GTAATCACAAC | | |
| | | | (SEQ ID. NO: 2475) | (SEQ ID. | (SEQ ID. | | |
| | | | | NO: | NO: 2477) | | |
| | | | | 2476) | | | |
| 1b | ebola_31 | CcaCas13b | agttcgcgccggactctgaccactg | agttcgcgc | GTTGGAACTGCT | Ebola | 1b |
| | | | atgttGTTGGAACTGCTCTCATTTT | cggactctg | CTCATTTTGGAGG | ssRNA | |
| | | | GGAGGGTAATCACAAC | accactgatg | GTAATCACAAC | | |
| | | | (SEQ ID. NO: 2478) | tt (SEQ | (SEQ ID. | | |
| | | | | ID. NO: | NO: 2480) | | |
| | | | | 2479) | | | |
| 1b | ebola_32 | CcaCas13b | aagttcgcgccggactctgaccact | aagttcgcg | GTTGGAACTGCT | Ebola | 1b |
| | | | gatgtGTTGGAACTGCTCTCATTTT | ccggactct | CTCATTTTGGAGG | ssRNA | |
| | | | GGAGGGTAATCACAAC | gaccactgat | GTAATCACAAC | | |
| | | | (SEQ ID. NO: 2481) | gt (SEQ | (SEQ ID. | | |
| | | | | ID. NO: | NO: 2483) | | |
| | | | | 2482) | | | |
| 1b | ebola_33 | CcaCas13b | gaagttcgcgccggactctgaccac | gaagttcgc | GTTGGAACTGCT | Ebola | 1b |
| | | | tgatgGTTGGAACTGCTCTCATTTT | gccggactc | CTCATTTTGGAGG | ssRNA | |
| | | | GGAGGGTAATCACAAC | tgaccactga | GTAATCACAAC | | |
| | | | (SEQ ID. NO: 2484) | tg (SEQ | (SEQ ID. | | |
| | | | | ID. NO: | NO: 2486) | | |
| | | | | 2485) | | | |
| 1b | ebola_34 | CcaCas13b | agaagttcgcgccggactctgacca | agaagttcg | GTTGGAACTGCT | Ebola | 1b |
| | | | ctgatGTTGGAACTGCTCTCATTTT | cgccggact | CTCATTTTGGAGG | ssRNA | |
| | | | GGAGGGTAATCACAAC | ctgaccactg | GTAATCACAAC | | |
| | | | (SEQ ID. NO: 2487) | at (SEQ | (SEQ ID. | | |
| | | | | ID. NO: | NO: 2489) | | |
| | | | | 2488) | | | |
| 1b | ebola_35 | CcaCas13b | gaagaagttcgcgccggactctgac | gaagaagtt | GTTGGAACTGCT | Ebola | 1b |
| | | | cactgGTTGGAACTGCTCTCATTTT | cgcgccgga | CTCATTTTGGAGG | ssRNA | |
| | | | GGAGGGTAATCACAAC | ctctgaccac | GTAATCACAAC | | |
| | | | (SEQ ID. NO: 2490) | tg (SEQ | (SEQ ID. | | |
| | | | | ID. NO: | NO: 2492) | | |
| | | | | 2491) | | | |
| 1b | ebola_36 | CcaCas13b | ggaagaagttcgcgccggactctga | ggaagaagt | GTTGGAACTGCT | Ebola | 1b |
| | | | ccactGTTGGAACTGCTCTCATTTT | tcgcgccgg | CTCATTTTGGAGG | ssRNA | |
| | | | GGAGGGTAATCACAAC | actctgacca | GTAATCACAAC | | |
| | | | (SEQ ID. NO: 2493) | ct (SEQ | (SEQ ID. | | |
| | | | | ID. NO: | NO: 2495) | | |
| | | | | 2494) | | | |
| 1b | ebola_37 | CcaCas13b | tcggaagaagttcgcgccggactct | tcggaagaa | GTTGGAACTGCT | Ebola | 1b |
| | | | gaccaGTTGGAACTGCTCTCATTTT | gttcgcgcc | CTCATTTTGGAGG | ssRNA | |
| | | | GGAGGGTAATCACAAC | ggactctga | GTAATCACAAC | | |
| | | | (SEQ ID. NO: 2496) | cca (SEQ | (SEQ ID. | | |
| | | | | ID. NO: | NO: 2498) | | |
| | | | | 2497) | | | |
| 1b | ebola_38 | CcaCas13b | gtcggaagaagttcgcgccggactc | gtcggaaga | GTTGGAACTGCT | Ebola | 1b |
| | | | tgaccGTTGGAACTGCTCTCATTTT | agttcgcgc | CTCATTTTGGAGG | ssRNA | |
| | | | GGAGGGTAATCACAAC | cggactctg | GTAATCACAAC | | |
| | | | (SEQ ID. NO: 2499) | acc (SEQ | (SEQ ID. | | |
| | | | | ID. NO: | NO: 2501) | | |
| | | | | 2500) | | | |
| 1b | ebola_39 | CcaCas13b | ggtcggaagaagttcgcgccggact | ggtcggaag | GTTGGAACTGCT | Ebola | 1b |
| | | | ctgacGTTGGAACTGCTCTCATTTT | aagttcgcg | CTCATTTTGGAGG | ssRNA | |
| | | | GGAGGGTAATCACAAC | ccggactct | GTAATCACAAC | | |
| | | | (SEQ ID. NO: 2502) | gac (SEQ | (SEQ ID. | | |
| | | | | ID. NO: | NO: 2504) | | |
| | | | | 2503) | | | |
| 1b | ebola_40 | CcaCas13b | gggtcggaagaagttcgcgccggac | gggtcggaa | GTTGGAACTGCT | Ebola | 1b |
| | | | tctgaGTTGGAACTGCTCTCATTTT | gaagttcgc | CTCATTTTGGAGG | ssRNA | |
| | | | GGAGGGTAATCACAAC | gccggactc | GTAATCACAAC | | |
| | | | (SEQ ID. NO: 2505) | tga (SEQ | (SEQ ID. | | |
| | | | | ID. NO: | NO: 2507) | | |
| | | | | 2506) | | | |
| 1b | ebola_41 | CcaCas13b | tgggtcggaagaagttcgcgccgga | tgggtcgga | GTTGGAACTGCT | Ebola | 1b |
| | | | ctctgGTTGGAACTGCTCTCATTTT | agaagttcg | CTCATTTTGGAGG | ssRNA | |
| | | | GGAGGGTAATCACAAC | cgccggact | GTAATCACAAC | | |
| | | | (SEQ ID. NO: 2508) | ctg (SEQ | (SEQ ID. | | |
| | | | | ID. NO: | NO: 2510) | | |
| | | | | 2509) | | | |
| 1b | ebola_42 | CcaCas13b | ccctgggtcggaagaagttcgcgcc | ccctgggtc | GTTGGAACTGCT | Ebola | 1b |
| | | | ggactGTTGGAACTGCTCTCATTTT | ggaagaagt | CTCATTTTGGAGG | ssRNA | |
| | | | GGAGGGTAATCACAAC | tcgcgccgg | GTAATCACAAC | | |
| | | | (SEQ ID. NO: 2511) | act (SEQ | (SEQ ID. | | |
| | | | | ID. NO: | NO: 2513) | | |
| | | | | 2512) | | | |
| 1b | ebola_43 | CcaCas13b | tccctgggtcggaagaagttcgcgc | tccctgggtc | GTTGGAACTGCT | Ebola | 1b |
| | | | cggacGTTGGAACTGCTCTCATTTT | ggaagaagt | CTCATTTTGGAGG | ssRNA | |
| | | | GGAGGGTAATCACAAC | tcgcgccgg | GTAATCACAAC | | |
| | | | (SEQ ID. NO: 2514) | ac (SEQ | (SEQ ID. | | |
| | | | | ID. NO: | NO: 2516) | | |
| | | | | 2515) | | | |
| 1b | ebola_44 | CcaCas13b | gtccctgggtcggaagaagttcgcg | gtccctgggt | GTTGGAACTGCT | Ebola | 1b |
| | | | ccggaGTTGGAACTGCTCTCATTTT | cggaagaag | CTCATTTTGGAGG | ssRNA | |
| | | | GGAGGGTAATCACAAC | ttcgcgccg | GTAATCACAAC | | |
| | | | (SEQ ID. NO: 2517) | ga (SEQ | (SEQ ID. | | |
| | | | | ID. NO: | NO: 2519) | | |
| | | | | 2518) | | | |
| 1b | ebola_45 | CcaCas13b | ggtccctgggtcggaagaagttcgc | ggtccctgg | GTTGGAACTGCT | Ebola | 1b |
| | | | gccggGTTGGAACTGCTCTCATTTT | gtcggaaga | CTCATTTTGGAGG | ssRNA | |
| | | | GGAGGGTAATCACAAC | agttcgcgc | GTAATCACAAC | | |
| | | | (SEQ ID. NO: 2520) | cgg (SEQ | (SEQ ID. | | |
| | | | | ID. NO: | NO: 2522) | | |
| | | | | 2521) | | | |
| 1b | ebola_46 | CcaCas13b | tggtccctgggtcggaagaagttcg | tggtccctgg | GTTGGAACTGCT | Ebola | 1b |
| | | | cgccgGTTGGAACTGCTCTCATTTT | gtcggaaga | CTCATTTTGGAGG | ssRNA | |
| | | | GGAGGGTAATCACAAC | agttcgcgc | GTAATCACAAC | | |
| | | | (SEQ ID. NO: 2523) | cg (SEQ | (SEQ ID. | | |
| | | | | ID. NO: | NO: 2525) | | |
| | | | | 2524) | | | |
| 1b | ebola_47 | CcaCas13b | ttggtccctgggtcggaagaagttc | ttggtccctg | GTTGGAACTGCT | Ebola | 1b |
| | | | gcgccGTTGGAACTGCTCTCATTTT | ggtcggaag | CTCATTTTGGAGG | ssRNA | |
| | | | GGAGGGTAATCACAAC | aagttcgcg | GTAATCACAAC | | |
| | | | (SEQ ID. NO: 2526) | cc (SEQ | (SEQ ID. | | |
| | | | | ID. NO: | NO: 2528) | | |
| | | | | 2527) | | | |
| 1b | ebola_48 | CcaCas13b | gtgttggtccctgggtcggaagaag | gtgttggtcc | GTTGGAACTGCT | Ebola | 1b |
| | | | ttcgcGTTGGAACTGCTCTCATTTT | ctgggtcgg | CTCATTTTGGAGG | ssRNA | |
| | | | GGAGGGTAATCACAAC | aagaagttc | GTAATCACAAC | | |
| | | | (SEQ ID. NO: 2529) | gc (SEQ | (SEQ ID. | | |
| | | | | ID. NO: | NO: 2531) | | |
| | | | | 2530) | | | |
| 1b | ebola_49 | CcaCas13b | tgtgttggtccctgggtcggaagaa | tgtgttggtc | GTTGGAACTGCT | Ebola | 1b |
| | | | gttcgGTTGGAACTGCTCTCATTTT | cctgggtcg | CTCATTTTGGAGG | ssRNA | |
| | | | GGAGGGTAATCACAAC | gaagaagtt | GTAATCACAAC | | |
| | | | (SEQ ID. NO: 2532) | cg (SEQ | (SEQ ID. | | |
| | | | | ID. NO: | NO: 2534) | | |
| | | | | 2533) | | | |
| 1b | ebola_50 | CcaCas13b | ttgtgttggtccctgggtcggaaga | ttgtgttggtc | GTTGGAACTGCT | Ebola | 1b |
| | | | agttcGTTGGAACTGCTCTCATTTT | cctgggtcg | CTCATTTTGGAGG | ssRNA | |
| | | | GGAGGGTAATCACAAC | gaagaagtt | GTAATCACAAC | | |
| | | | (SEQ ID. NO: 2535) | c (SEQ | (SEQ ID. | | |
| | | | | ID. NO: | NO: 2537) | | |
| | | | | 2536) | | | |
| 1b | ebola_51 | CcaCas13b | tgttgtgttggtccctgggtcggaa | tgttgtgttgg | GTTGGAACTGCT | Ebola | 1b |
| | | | gaagtGTTGGAACTGCTCTCATTTT | tccctgggtc | CTCATTTTGGAGG | ssRNA | |
| | | | GGAGGGTAATCACAAC | ggaagaagt | GTAATCACAAC | | |
| | | | (SEQ ID. NO: 2538) | (SEQ ID. | (SEQ ID. | | |
| | | | | NO: | NO: 2540) | | |
| | | | | 2539) | | | |
| 1b | ebola_52 | CcaCas13b | ttgttgtgttggtccctgggtcgga | ttgttgtgttg | GTTGGAACTGCT | Ebola | 1b |
| | | | agaagGTTGGAACTGCTCTCATTTT | gtccctgggt | CTCATTTTGGAGG | ssRNA | |
| | | | GGAGGGTAATCACAAC | cggaagaag | GTAATCACAAC | | |
| | | | (SEQ ID. NO: 2541) | (SEQ ID. | (SEQ ID. | | |
| | | | | NO: | NO: 2543) | | |
| | | | | 2542) | | | |
| 1b | ebola_53 | CcaCas13b | gttgttgtgttggtccctgggtcgg | gttgttgtgtt | GTTGGAACTGCT | Ebola | 1b |
| | | | aagaaGTTGGAACTGCTCTCATTTT | ggtccctgg | CTCATTTTGGAGG | ssRNA | |
| | | | GGAGGGTAATCACAAC | gtcggaaga | GTAATCACAAC | | |
| | | | (SEQ ID. NO: 2544) | a (SEQ | (SEQ ID. | | |
| | | | | ID. NO: | NO: 2546) | | |
| | | | | 2545) | | | |
| 1b | ebola_54 | CcaCas13b | tcagttgttgtgttggtccctgggt | tcagttgttgt | GTTGGAACTGCT | Ebola | 1b |
| | | | cggaaGTTGGAACTGCTCTCATTTT | gttggtccct | CTCATTTTGGAGG | ssRNA | |
| | | | GGAGGGTAATCACAAC | gggtcggaa | GTAATCACAAC | | |
| | | | (SEQ ID. NO: 2547) | (SEQ ID. | (SEQ ID. | | |
| | | | | NO: | NO: 2549) | | |
| | | | | 2548) | | | |
| 1b | ebola_55 | CcaCas13b | ttcagttgttgtgttggtccctggg | ttcagttgttg | GTTGGAACTGCT | Ebola | 1b |
| | | | tcggaGTTGGAACTGCTCTCATTTT | tgttggtccct | CTCATTTTGGAGG | ssRNA | |
| | | | GGAGGGTAATCACAAC | gggtcgga | GTAATCACAAC | | |
| | | | (SEQ ID. NO: 2550) | (SEQ ID. | (SEQ ID. | | |
| | | | | NO: | NO: 2552) | | |
| | | | | 2551) | | | |
| 1b | ebola_56 | CcaCas13b | cttcagttgttgtgttggtccctgg | cttcagttgtt | GTTGGAACTGCT | Ebola | 1b |
| | | | gtcggGTTGGAACTGCTCTCATTTT | gtgttggtcc | CTCATTTTGGAGG | ssRNA | |
| | | | GGAGGGTAATCACAAC | ctgggtcgg | GTAATCACAAC | | |
| | | | (SEQ ID. NO: 2553) | (SEQ ID. | (SEQ ID. | | |
| | | | | NO: | NO: 2555) | | |
| | | | | 2554) | | | |
| 1b | ebola_57 | CcaCas13b | tcttcagttgttgtgttggtccctg | tcttcagttgt | GTTGGAACTGCT | Ebola | 1b |
| | | | ggtcgGTTGGAACTGCTCTCATTTT | tgtgttggtc | CTCATTTTGGAGG | ssRNA | |
| | | | GGAGGGTAATCACAAC | cctgggtcg | GTAATCACAAC | | |
| | | | (SEQ ID. NO: 2556) | (SEQ ID. | (SEQ ID. | | |
| | | | | NO: | NO: 2558) | | |
| | | | | 2557) | | | |
| 1b | ebola_58 | CcaCas13b | gtcttcagttgttgtgttggtccct | gtcttcagttg | GTTGGAACTGCT | Ebola | 1b |
| | | | gggtcGTTGGAACTGCTCTCATTTT | ttgtgttggtc | CTCATTTTGGAGG | ssRNA | |
| | | | GGAGGGTAATCACAAC | cctgggtc | GTAATCACAAC | | |
| | | | (SEQ ID. NO: 2559) | (SEQ ID. | (SEQ ID. | | |
| | | | | NO: | NO: 2561) | | |
| | | | | 2560) | | | |
| 1b | ebola_59 | CcaCas13b | ggtcttcagttgttgtgttggtccc | ggtcttcagtt | GTTGGAACTGCT | Ebola | 1b |
| | | | tgggtGTTGGAACTGCTCTCATTTT | gttgtgttggt | CTCATTTTGGAGG | ssRNA | |
| | | | GGAGGGTAATCACAAC | ccctgggt | GTAATCACAAC | | |
| | | | (SEQ ID. NO: 2562) | (SEQ ID. | (SEQ ID. | | |
| | | | | NO: | NO: 2564) | | |
| | | | | 2563) | | | |
| 1b | ebola_60 | CcaCas13b | tgtggtcttcagttgttgtgttggt | tgtggtcttca | GTTGGAACTGCT | Ebola | 1b |
| | | | ccctgGTTGGAACTGCTCTCATTTT | gttgttgtgtt | CTCATTTTGGAGG | ssRNA | |
| | | | GGAGGGTAATCACAAC | ggtccctg | GTAATCACAAC | | |
| | | | (SEQ ID. NO: 2565) | (SEQ ID. | (SEQ ID. | | |
| | | | | NO: | NO: 2567) | | |
| | | | | 2566) | | | |
| 1b | ebola_61 | CcaCas13b | ttgtggtcttcagttgttgtgttgg | ttgtggtcttc | GTTGGAACTGCT | Ebola | 1b |
| | | | tccctGTTGGAACTGCTCTCATTTT | agttgttgtgt | CTCATTTTGGAGG | ssRNA | |
| | | | GGAGGGTAATCACAAC | tggtccct | GTAATCACAAC | | |
| | | | (SEQ ID. NO: 2568) | (SEQ ID. | (SEQ ID. | | |
| | | | | NO: | NO: 2570) | | |
| | | | | 2569) | | | |
| 1b | ebola_62 | CcaCas13b | tttgtggtcttcagttgttgtgttg | ttgtggtctt | GTTGGAACTGCT | Ebola | 1b |
| | | | gtcccGTTGGAACTGCTCTCATTTT | cagttgttgt | CTCATTTTGGAGG | ssRNA | |
| | | | GGAGGGTAATCACAAC | gttggtccc | GTAATCACAAC | | |
| | | | (SEQ ID. NO: 2571) | (SEQ ID. | (SEQ ID. | | |
| | | | | NO: | NO: 2573) | | |
| | | | | 2572) | | | |
| 1b | ebola_63 | CcaCas13b | ttttgtggtcttcagttgttgtgtt | tttgtggtctt | GTTGGAACTGCT | Ebola | 1b |
| | | | ggtccGTTGGAACTGCTCTCATTTT | cagttgttgt | CTCATTTTGGAGG | ssRNA | |
| | | | GGAGGGTAATCACAAC | gttggtcc | GTAATCACAAC | | |
| | | | (SEQ ID. NO: 2574) | (SEQ ID. | (SEQ ID. | | |
| | | | | NO: | NO: 2576) | | |
| | | | | 2575) | | | |
| 1b | ebola_64 | CcaCas13b | gattttgtggtcttcagttgttgtg | gattttgtggt | GTTGGAACTGCT | Ebola | 1b |
| | | | ttggtGTTGGAACTGCTCTCATTTT | cttcagttgtt | CTCATTTTGGAGG | ssRNA | |
| | | | GGAGGGTAATCACAAC | gtgttggt | GTAATCACAAC | | |
| | | | (SEQ ID. NO: 2577) | (SEQ ID. | (SEQ ID. | | |
| | | | | NO: | NO: 2579) | | |
| | | | | 2578) | | | |
| 1b | ebola_65 | CcaCas13b | tgattttgtggtcttcagttgttgt | tgattttgtgg | GTTGGAACTGCT | Ebola | 1b |
| | | | gttggGTTGGAACTGCTCTCATTTT | tcttcagttgt | CTCATTTTGGAGG | ssRNA | |
| | | | GGAGGGTAATCACAAC | tgtgttgg | GTAATCACAAC | | |
| | | | (SEQ ID. NO: 2580) | (SEQ ID. | (SEQ ID. | | |
| | | | | NO: | NO: 2582) | | |
| | | | | 2581) | | | |
| 1b | ebola_66 | CcaCas13b | atgattttgtggtcttcagttgttg | atgattttgtg | GTTGGAACTGCT | Ebola | 1b |
| | | | tgttgGTTGGAACTGCTCTCATTTT | gtcttcagttg | CTCATTTTGGAGG | ssRNA | |
| | | | GGAGGGTAATCACAAC | ttgtgttg | GTAATCACAAC | | |
| | | | (SEQ ID. NO: 2583) | (SEQ ID. | (SEQ ID. | | |
| | | | | NO: | NO: 2585) | | |
| | | | | 2584) | | | |
| 1b | ebola_67 | CcaCas13b | ccatgattttgtggtcttcagttgt | ccatgattttg | GTTGGAACTGCT | Ebola | 1b |
| | | | tgtgtGTTGGAACTGCTCTCATTTT | tggtcttcagt | CTCATTTTGGAGG | ssRNA | |
| | | | GGAGGGTAATCACAAC | tgttgtgt | GTAATCACAAC | | |
| | | | (SEQ ID. NO: 2586) | (SEQ ID. | (SEQ ID. | | |
| | | | | NO: | NO: 2588) | | |
| | | | | 2587) | | | |
| 1b | ebola_68 | CcaCas13b | agccatgattttgtggtcttcagtt | agccatgatt | GTTGGAACTGCT | Ebola | 1b |
| | | | gttgtGTTGGAACTGCTCTCATTTT | ttgtggtcttc | CTCATTTTGGAGG | ssRNA | |
| | | | GGAGGGTAATCACAAC | agttgttgt | GTAATCACAAC | | |
| | | | (SEQ ID. NO: 2589) | (SEQ ID. | (SEQ ID. | | |
| | | | | NO: | NO: 2591) | | |
| | | | | 2590) | | | |
| 1b | ebola_69 | CcaCas13b | aagccatgattttgtggtcttcagt | aagccatgat | GTTGGAACTGCT | Ebola | 1b |
| | | | tgttgGTTGGAACTGCTCTCATTTT | tttgtggtctt | CTCATTTTGGAGG | ssRNA | |
| | | | GGAGGGTAATCACAAC | cagttgttg | GTAATCACAAC | | |
| | | | (SEQ ID. NO: 2592) | (SEQ ID. | (SEQ ID. | | |
| | | | | NO: | NO: 2594) | | |
| | | | | 2593) | | | |
| 1b | ebola_70 | CcaCas13b | gaagccatgattttgtggtcttcag | gaagccatg | GTTGGAACTGCT | Ebola | 1b |
| | | | ttgttGTTGGAACTGCTCTCATTTT | attttgtggtc | CTCATTTTGGAGG | ssRNA | |
| | | | GAGGGTAATCACAAC | ttcagttgtt | GTAATCACAAC | | |
| | | | G(SEQ ID. NO: 2595) | (SEQ ID. | (SEQ ID. | | |
| | | | | NO: | NO: 2597) | | |
| | | | | 2596) | | | |
| 1b | ebola_71 | CcaCas13b | tgaagccatgattttgtggtcttca | tgaagccat | GTTGGAACTGCT | Ebola | 1b |
| | | | gttgtGTTGGAACTGCTCTCATTTT | gattttgtggt | CTCATTTTGGAGG | ssRNA | |
| | | | GGAGGGTAATCACAAC | cttcagttgt | GTAATCACAAC | | |
| | | | (SEQ ID. NO: 2598) | (SEQ ID. | (SEQ ID. | | |
| | | | | NO: | NO: 2600) | | |
| | | | | 2599) | | | |
| 1b | ebola_72 | CcaCas13b | ttctgaagccatgattttgtggtct | ttctgaagcc | GTTGGAACTGCT | Ebola | 1b |
| | | | tcagtGTTGGAACTGCTCTCATTTT | atgattttgtg | CTCATTTTGGAGG | ssRNA | |
| | | | GGAGGGTAATCACAAC | gtcttcagt | GTAATCACAAC | | |
| | | | (SEQ ID. NO: 2601) | (SEQ ID. | (SEQ ID. | | |
| | | | | NO: | NO: 2603) | | |
| | | | | 2602) | | | |
| 1b | ebola_73 | CcaCas13b | tttctgaagccatgattttgtggtc | tttctgaagc | GTTGGAACTGCT | Ebola | 1b |
| | | | ttcagGTTGGAACTGCTCTCATTTT | catgattttgt | CTCATTTTGGAGG | ssRNA | |
| | | | GGAGGGTAATCACAAC | ggtcttcag | GTAATCACAAC | | |
| | | | (SEQ ID. NO: 2604) | (SEQ ID. | (SEQ ID. | | |
| | | | | NO: | NO: 2606) | | |
| | | | | 2605) | | | |
| 1b | ebola_74 | CcaCas13b | attttctgaagccatgattttgtgg | attttctgaag | GTTGGAACTGCT | Ebola | 1b |
| | | | tcttcGTTGGAACTGCTCTCATTTT | ccatgattttg | CTCATTTTGGAGG | ssRNA | |
| | | | GGAGGGTAATCACAAC | tggtcttc | GTAATCACAAC | | |
| | | | (SEQ ID. NO: 2607) | (SEQ ID. | (SEQ ID. | | |
| | | | | NO: | NO: 2609) | | |
| | | | | 2608) | | | |
| 1b | ebola_75 | CcaCas13b | aattttctgaagccatgattttgtg | aattttctgaa | GTTGGAACTGCT | Ebola | 1b |
| | | | gtcttGTTGGAACTGCTCTCATTTT | gccatgatttt | CTCATTTTGGAGG | ssRNA | |
| | | | GGAGGGTAATCACAAC | gtggtctt | GTAATCACAAC | | |
| | | | (SEQ ID. NO: 2610) | (SEQ ID. | (SEQ ID. | | |
| | | | | NO: | NO: 2612) | | |
| | | | | 2611) | | | |
| 1b | ebola_76 | CcaCas13b | gaattttctgaagccatgattttgt | gaattttctga | GTTGGAACTGCT | Ebola | 1b |
| | | | ggtctGTTGGAACTGCTCTCATTTT | agccatgatt | CTCATTTTGGAGG | ssRNA | |
| | | | GGAGGGTAATCACAAC | ttgtggtct | GTAATCACAAC | | |
| | | | (SEQ ID. NO: 2613) | (SEQ ID. | (SEQ ID. | | |
| | | | | NO: | NO: 2615) | | |
| | | | | 2614) | | | |
| 1b | ebola_77 | CcaCas13b | aggaattttctgaagccatgatttt | aggaattttct | GTTGGAACTGCT | Ebola | 1b |
| | | | gtggtGTTGGAACTGCTCTCATTTT | gaagccatg | CTCATTTTGGAGG | ssRNA | |
| | | | GGAGGGTAATCACAAC | attttgtggt | GTAATCACAAC | | |
| | | | (SEQ ID. NO: 2616) | (SEQ ID. | (SEQ ID. | | |
| | | | | NO: | NO: 2618) | | |
| | | | | 2617) | | | |
| 1b | ebola_78 | CcaCas13b | agaggaattttctgaagccatgatt | agaggaattt | GTTGGAACTGCT | Ebola | 1b |
| | | | ttgtgGTTGGAACTGCTCTCATTTT | tctgaagcca | CTCATTTTGGAGG | ssRNA | |
| | | | GGAGGGTAATCACAAC | tgattttgtg | GTAATCACAAC | | |
| | | | (SEQ ID. NO: 2619) | (SEQ ID. | (SEQ ID. | | |
| | | | | NO: | NO: 2621) | | |
| | | | | 2620) | | | |
| 1b | ebola_79 | CcaCas13b | cagaggaattttctgaagccatgat | cagaggaat | GTTGGAACTGCT | Ebola | 1b |
| | | | tttgtGTTGGAACTGCTCTCATTTT | tttctgaagc | CTCATTTTGGAGG | ssRNA | |
| | | | GGAGGGTAATCACAAC | catgattttgt | GTAATCACAAC | | |
| | | | (SEQ ID. NO: 2622) | (SEQ ID. | (SEQ ID. | | |
| | | | | NO: | NO: 2624) | | |
| | | | | 2623) | | | |
| 1b | ebola_80 | CcaCas13b | gcagaggaattttctgaagccatga | gcagaggaa | GTTGGAACTGCT | Ebola | 1b |
| | | | ttttgGTTGGAACTGCTCTCATTTT | ttttctgaagc | CTCATTTTGGAGG | ssRNA | |
| | | | GGAGGGTAATCACAAC | catgattttg | GTAATCACAAC | | |
| | | | (SEQ ID. NO: 2625) | (SEQ ID. | (SEQ ID. | | |
| | | | | NO: | NO: 2627) | | |
| | | | | 2626) | | | |
| 1b | ebola_81 | CcaCas13b | tgcagaggaattttctgaagccatg | tgcagagga | GTTGGAACTGCT | Ebola | 1b |
| | | | attttGTTGGAACTGCTCTCATTTT | attttctgaag | CTCATTTTGGAGG | ssRNA | |
| | | | GGAGGGTAATCACAAC | ccatgatttt | GTAATCACAAC | | |
| | | | (SEQ ID. NO: 2628) | (SEQ ID. | (SEQ ID. | | |
| | | | | NO: | NO: 2630) | | |
| | | | | 2629) | | | |
| 1b | ebola_82 | CcaCas13b | cattgcagaggaattttctgaagcc | cattgcaga | GTTGGAACTGCT | Ebola | 1b |
| | | | atgatGTTGGAACTGCTCTCATTTT | ggaattttctg | CTCATTTTGGAGG | ssRNA | |
| | | | GGAGGGTAATCACAAC | aagccatgat | GTAATCACAAC | | |
| | | | (SEQ ID. NO: 2631) | (SEQ ID. | (SEQ ID. | | |
| | | | | NO: | NO: 2633) | | |
| | | | | 2632) | | | |
| 1b | ebola_83 | CcaCas13b | ccattgcagaggaattttctgaagc | ccattgcaga | GTTGGAACTGCT | Ebola | 1b |
| | | | catgaGTTGGAACTGCTCTCATTTT | ggaattttctg | CTCATTTTGGAGG | ssRNA | |
| | | | GGAGGGTAATCACAAC | aagccatga | GTAATCACAAC | | |
| | | | (SEQ ID. NO: 2634) | (SEQ ID. | (SEQ ID. | | |
| | | | | NO: | NO: 2636) | | |
| | | | | 2635) | | | |
| 1b | ebola_84 | CcaCas13b | accattgcagaggaattttctgaag | accattgcag | GTTGGAACTGCT | Ebola | 1b |
| | | | ccatgGTTGGAACTGCTCTCATTTT | aggaattttct | CTCATTTTGGAGG | ssRNA | |
| | | | GGAGGGTAATCACAAC | gaagccatg | GTAATCACAAC | | |
| | | | (SEQ ID. NO: 2637) | (SEQ ID. | (SEQ ID. | | |
| | | | | NO: | NO: 2639) | | |
| | | | | 2638) | | | |
| 1b | ebola_85 | CcaCas13b | aaccattgcagaggaattttctgaa | aaccattgca | GTTGGAACTGCT | Ebola | 1b |
| | | | gccatGTTGGAACTGCTCTCATTTT | gaggaatttt | CTCATTTTGGAGG | ssRNA | |
| | | | GGAGGGTAATCACAAC | ctgaagccat | GTAATCACAAC | | |
| | | | (SEQ ID. NO: 2640) | (SEQ ID. | (SEQ ID. | | |
| | | | | NO: | NO: 2642) | | |
| | | | | 2641) | | | |
| 1b | ebola_86 | CcaCas13b | ttgaaccattgcagaggaattttct | ttgaaccatt | GTTGGAACTGCT | Ebola | 1b |
| | | | gaagcGTTGGAACTGCTCTCATTTT | gcagaggaa | CTCATTTTGGAGG | ssRNA | |
| | | | GGAGGGTAATCACAAC | ttttctgaagc | GTAATCACAAC | | |
| | | | (SEQ ID. NO: 2643) | (SEQ ID. | (SEQ ID. | | |
| | | | | NO: | NO: 2645) | | |
| | | | | 2644) | | | |
| 1b | ebola_87 | CcaCas13b | acttgaaccattgcagaggaatttt | acttgaacca | GTTGGAACTGCT | Ebola | 1b |
| | | | ctgaaGTTGGAACTGCTCTCATTTT | ttgcagagg | CTCATTTTGGAGG | ssRNA | |
| | | | GGAGGGTAATCACAAC | aattttctgaa | GTAATCACAAC | | |
| | | | (SEQ ID. NO: 2646) | (SEQ ID. | (SEQ ID. | | |
| | | | | NO: | NO: 2648) | | |
| | | | | 2647) | | | |
| 1b | ebola_88 | CcaCas13b | cacttgaaccattgcagaggaattt | cacttgaacc | GTTGGAACTGCT | Ebola | 1b |
| | | | tctgaGTTGGAACTGCTCTCATTTT | attgcagag | CTCATTTTGGAGG | ssRNA | |
| | | | GGAGGGTAATCACAAC | gaattttctga | GTAATCACAAC | | |
| | | | (SEQ ID. NO: 2649) | (SEQ ID. | (SEQ ID. | | |
| | | | | NO: | NO: 2651) | | |
| | | | | 2650) | | | |
| 1b | ebola_89 | CcaCas13b | tgcacttgaaccattgcagaggaat | tgcacttgaa | GTTGGAACTGCT | Ebola | 1b |
| | | | tttctGTTGGAACTGCTCTCATTTT | ccattgcaga | CTCATTTTGGAGG | ssRNA | |
| | | | GGAGGGTAATCACAAC | ggaattttct | GTAATCACAAC | | |
| | | | (SEQ ID. NO: 2652) | (SEQ ID. | (SEQ ID. | | |
| | | | | NO: | NO: 2654) | | |
| | | | | 2653) | | | |
| 1b | ebola_90 | CcaCas13b | gtgcacttgaaccattgcagaggaa | gtgcacttga | GTTGGAACTGCT | Ebola | 1b |
| | | | ttttcGTTGGAACTGCTCTCATTTT | accattgcag | CTCATTTTGGAGG | ssRNA | |
| | | | GGAGGGTAATCACAAC | aggaattttc | GTAATCACAAC | | |
| | | | (SEQ ID. NO: 2655) | (SEQ ID. | (SEQ ID. | | |
| | | | | NO: | NO: 2657) | | |
| | | | | 2656) | | | |
| 1b | ebola_91 | CcaCas13b | ctgtgcacttgaaccattgcagagg | ctgtgcactt | GTTGGAACTGCT | Ebola | 1b |
| | | | aatttGTTGGAACTGCTCTCATTTT | gaaccattgc | CTCATTTTGGAGG | ssRNA | |
| | | | GGAGGGTAATCACAAC | agaggaattt | GTAATCACAAC | | |
| | | | (SEQ ID. NO: 2658) | (SEQ ID. | (SEQ ID. | | |
| | | | | NO: | NO: 2660) | | |
| | | | | 2659) | | | |
| 1b | ebola_92 | CcaCas13b | actgtgcacttgaaccattgcagag | actgtgcact | GTTGGAACTGCT | Ebola | 1b |
| | | | gaattGTTGGAACTGCTCTCATTTT | tgaaccattg | CTCATTTTGGAGG | ssRNA | |
| | | | GGAGGGTAATCACAAC | cagaggaat | GTAATCACAAC | | |
| | | | (SEQ ID. NO: 2661) | t (SEQ | (SEQ ID. | | |
| | | | | ID. NO: | NO: 2663) | | |
| | | | | 2662) | | | |
| 1b | ebola_93 | CcaCas13b | tgactgtgcacttgaaccattgcag | tgactgtgca | GTTGGAACTGCT | Ebola | 1b |
| | | | aggaaGTTGGAACTGCTCTCATTTT | cttgaaccat | CTCATTTTGGAGG | ssRNA | |
| | | | GGAGGGTAATCACAAC | tgcagagga | GTAATCACAAC | | |
| | | | (SEQ ID. NO: 2664) | a (SEQ | (SEQ ID. | | |
| | | | | ID. NO: | NO: 2666) | | |
| | | | | 2665) | | | |
| 1b | ebola_94 | CcaCas13b | ttgactgtgcacttgaaccattgca | ttgactgtgc | GTTGGAACTGCT | Ebola | 1b |
| | | | gaggaGTTGGAACTGCTCTCATTTT | acttgaacca | CTCATTTTGGAGG | ssRNA | |
| | | | GGAGGGTAATCACAAC | ttgcagagg | GTAATCACAAC | | |
| | | | (SEQ ID. NO: 2667) | a (SEQ | (SEQ ID. | | |
| | | | | ID. NO: | NO: 2669) | | |
| | | | | 2668) | | | |
| 2a | thermo- | LwaCas13a | GATTTAGACTACCCCAAAA | TATCAA | GATTTAGACTAC | ther- | 2a |
| | nuclease | | ACGAAGGGGACTAAAACT | CCAATA | CCCAAAAACGAA | mo- | |
| | valida- | | ATCAACCAATAATAGTCTG | ATAGTC | GGGGACTAAAAC | nu- | |
| | tion | | AATGTCAT | TGAATG | (SEQ ID. | clease | |
| | LwaCas13 | | (SEQ ID. NO: 2670) | TCAT | NO: 2672) | | |
| | a 1 | | | (SEQ ID. | | | |
| | | | | NO: | | | |
| | | | | 2671) | | | |
| 2a | thermo- | LwaCas13a | GATTTAGACTACCCCAAAA | ATGTCA | GATTTAGACTAC | ther- | 2a |
| | nuclease | | ACGAAGGGGACTAAAACA | TTGGTT | CCCAAAAACGAA | mo- | |
| | valida- | | TGTCATTGGTTGACCTTTGT | GACCTT | GGGGACTAAAAC | nu- | |
| | tion | | ACATTAA | TGTACA | (SEQ ID. | clease | |
| | LwaCas13 | | (SEQ ID. NO: 2673) | TTAA | NO: 2675) | | |
| | a 2 | | | (SEQ ID. | | | |
| | | | | NO: | | | |
| | | | | 2674) | | | |
| 2a | thermo- | LwaCas13a | GATTTAGACTACCCCAAAA | TTAGGA | GATTTAGACTAC | ther- | 2a |
| | nuclease | | ACGAAGGGGACTAAAACTT | TGCTTT | CCCAAAAACGAA | mo- | |
| | valida- | | AGGATGCTTTGTTTCAGGT | GTTTCA | GGGGACTAAAAC | nu- | |
| | tion | | GTATCAA | GGTGTA | (SEQ ID. | clease | |
| | LwaCas13 | | (SEQ ID. NO: 2676) | TCAA | NO: 2678) | | |
| | a 3 | | | (SEQ ID. | | | |
| | | | | NO: | | | |
| | | | | 2677) | | | |
| 2a | thermo- | LwaCas13a | GATTTAGACTACCCCAAAA | TTTCTC | GATTTAGACTAC | ther- | 2a |
| | nuclease | | ACGAAGGGGACTAAAACTT | TACACC | CCCAAAAACGAA | mo- | |
| | valida- | | TCTCTACACCTTTTTTAGGA | AGGATG | GGGGACTAAAAC | nu- | |
| | tion | | TGCTTT | CTTT | (SEQ ID. | clease | |
| | LwaCas13 | | (SEQ ID. NO: 2679) | (SEQ ID. | NO: 2681) | | |
| | a 4 | | | NO: | | | |
| | | | | 2680) | | | |
| 2a | thermo- | LwaCas13a | GATTTAGACTACCCCAAAA | TGTCAT | GATTTAGACTAC | ther- | 2a |
| | nuclease | | ACGAAGGGGACTAAAACT | TGGTTG | CCCAAAAACGAA | mo- | |
| | valida- | | GTCATTGGTTGACCTTTGT | ACCTTT | GGGGACTAAAAC | nu- | |
| | tion | | ACATTAAT | GTACAT | (SEQ ID. | clease | |
| | LwaCas13 | | (SEQ ID. NO: 2682) | TAAT | NO: 2684) | | |
| | a 5 | | | (SEQ ID. | | | |
| | | | | NO: | | | |
| | | | | 2683) | | | |
| 2a | thermo- | LwaCas13a | GATTTAGACTACCCCAAAA | ATAGTC | GATTTAGACTAC | ther- | 2a |
| | nuclease | | ACGAAGGGGACTAAAACA | TGAATG | CCCAAAAACGAA | mo- | |
| | valida- | | TAGTCTGAATGTCATTGGT | TCATTG | GGGGACTAAAAC | nu- | |
| | tion | | TGACCTTT | GTTGAC | (SEQ ID. | clease | |
| | LwaCas13 | | (SEQ ID. NO: 2685) | CTTT | NO: 2687) | | |
| | a 6 | | | (SEQ ID. | | | |
| | | | | NO: | | | |
| | | | | 2686) | | | |
| 2a | thermo- | LwaCas13a | GATTTAGACTACCCCAAAA | AGTCTG | GATTTAGACTAC | ther- | 2a |
| | nuclease | | ACGAAGGGGACTAAAACA | AATGTC | CCCAAAAACGAA | mo- | |
| | valida- | | GTCTGAATGTCATTGGTTG | ATTGGT | GGGGACTAAAAC | nu- | |
| | tion | | ACCTTTGT | TGACCT | (SEQ ID. | clease | |
| | LwaCas13 | | (SEQ ID. NO: 2688) | TTGT | NO: 2690) | | |
| | a 7 | | | (SEQ ID. | | | |
| | | | | NO: | | | |
| | | | | 2689) | | | |
| 2a | thermo- | LwaCas13a | GATTTAGACTACCCCAAAA | TACATT | GATTTAGACTAC | ther- | 2a |
| | nuclease | | ACGAAGGGGACTAAAACT | AATTTA | CCCAAAAACGAA | mo- | |
| | valida- | | ACATTAATTTAACAGTATC | ACAGTA | GGGGACTAAAAC | nu- | |
| | tion | | ACCATCAA | TCACCA | (SEQ ID. | clease | |
| | LwaCas13 | | (SEQ ID. NO: 2691) | TCAA | NO: 2693) | | |
| | a 8 | | | (SEQ ID. | | | |
| | | | | NO: | | | |
| | | | | 2692) | | | |
| 2a | thermo- | LwaCas13a | GATTTAGACTACCCCAAAA | ATGCTT | GATTTAGACTAC | ther- | 2a |
| | nuclease | | ACGAAGGGGACTAAAACA | TGTTTC | CCCAAAAACGAA | mo- | |
| | valida- | | TGCTTTGTTTCAGGTGTATC | AGGTGT | GGGGACTAAAAC | nu- | |
| | tion | | AACCAAT | ATCAAC | (SEQ ID. | clease | |
| | LwaCas13 | | (SEQ ID. NO: 2694) | CAAT | NO: 2696) | | |
| | a 9 | | | (SEQ ID. | | | |
| | | | | NO: | | | |
| | | | | 2695) | | | |
| 2a | thermo- | LwaCas13a | GATTTAGACTACCCCAAAA | AGGATG | GATTTAGACTAC | ther- | 2a |
| | nuclease | | ACGAAGGGGACTAAAACA | CTTTGT | CCCAAAAACGAA | mo- | |
| | valida- | | GGATGCTTTGTTTCAGGTG | TTCAGG | GGGGACTAAAAC | nu- | |
| | tion | | TATCAACC | TGTATC | (SEQ ID. | clease | |
| | LwaCas13 | | (SEQ ID. NO: 2697) | AACC | NO: 2699) | | |
| | a 10 | | | (SEQ ID. | | | |
| | | | | NO: | | | |
| | | | | 2698) | | | |
| 2a | thermo- | LwaCas13a | GATTTAGACTACCCCAAAA | CATATT | GATTTAGACTAC | ther- | 2a |
| | nuclease | | ACGAAGGGGACTAAAACC | TCTCTA | CCCAAAAACGAA | mo- | |
| | valida- | | ATATTTCTCTACACCTTTTT | CACCTT | GGGGACTAAAAC | nu- | |
| | tion | | TAGGATG | TTTTAG | (SEQ ID. | clease | |
| | LwaCas13 | | (SEQ ID. NO: 2700) | GATG | NO: 2702) | | |
| | a 11 | | | (SEQ ID. | | | |
| | | | | NO: | | | |
| | | | | 2701) | | | |
| 2a | thermo- | LwaCas13a | GATTTAGACTACCCCAAAA | ACCATA | GATTTAGACTAC | ther- | 2a |
| | nuclease | | ACGAAGGGGACTAAAACA | TTTCTC | CCCAAAAACGAA | mo- | |
| | valida- | | CCATATTTCTCTACACCTTT | TACACC | GGGGACTAAAAC | nu- | |
| | tion | | TTTAGGA | AGGA | (SEQ ID. | clease | |
| | LwaCas13 | | (SEQ ID. NO: 2703) | (SEQ ID. | NO: 2705) | | |
| | a 12 | | | NO: | | | |
| | | | | 2704) | | | |
| 2a | thermo- | LwaCas13a | GATTTAGACTACCCCAAAA | CTTTTT | GATTTAGACTAC | ther- | 2a |
| | nuclease | | ACGAAGGGGACTAAAACC | TAGGAT | CCCAAAAACGAA | mo- | |
| | valida- | | TTTTTTAGGATGCTTTGTTT | GCTTTG | GGGGACTAAAAC | nu- | |
| | tion | | CAGGTGT | TTTCAG | (SEQ ID. | clease | |
| | LwaCas13 | | (SEQ ID. NO: 2706) | GTGT | NO: 2708) | | |
| | a 13 | | | (SEQ ID. | | | |
| | | | | NO: | | | |
| | | | | 2707) | | | |
| 2a | thermo- | LwaCas13a | GATTTAGACTACCCCAAAA | TACACC | GATTTAGACTAC | ther- | 2a |
| | nuclease | | ACGAAGGGGACTAAAACT | AGGATG | CCCAAAAACGAA | mo- | |
| | valida- | | ACACCTTTTTTAGGATGCTT | CTTTGT | GGGGACTAAAAC | nu- | |
| | tion | | TGTTTCA | TTCA | (SEQ ID. | clease | |
| | LwaCas13 | | (SEQ ID. NO: 2709) | (SEQ ID. | NO: 2711) | | |
| | a 14 | | | NO: | | | |
| | | | | 2710) | | | |
| 2a | thermo- | LwaCas13a | GATTTAGACTACCCCAAAA | TCTTTT | GATTTAGACTAC | ther- | 2a |
| | nuclease | | ACGAAGGGGACTAAAACT | TCGTAA | CCCAAAAACGAA | mo- | |
| | valida- | | CTTTTTCGTAAATGCACTTG | ATGCAC | GGGGACTAAAAC | nu- | |
| | tion | | CTTCAGG | TTGCTT | (SEQ ID. | clease | |
| | LwaCas13 | | (SEQ ID. NO: 2712) | CAGG | NO: 2714) | | |
| | a 15 | | | (SEQ ID. | | | |
| | | | | NO: | | | |
| | | | | 2713) | | | |
| 2a | thermo- | LwaCas13a | GATTTAGACTACCCCAAAA | TTTTCT | GATTTAGACTAC | ther- | 2a |
| | nuclease | | ACGAAGGGGACTAAAACTT | TTGCAT | CCCAAAAACGAA | mo- | |
| | valida- | | TTCTTTGCATTTTCTACCAT | TTTCTA | GGGGACTAAAAC | nu- | |
| | tion | | CTTTTT | CCATCT | (SEQ ID. | clease | |
| | LwaCas13 | | (SEQ ID. NO: 2715) | TTTT | NO: 2717) | | |
| | a 16 | | | (SEQ ID. | | | |
| | | | | NO: | | | |
| | | | | 2716) | | | |
| 2a | thermo- | LwaCas13a | GATTTAGACTACCCCAAAA | TGAATG | GATTTAGACTAC | ther- | 2a |
| | nuclease | | ACGAAGGGGACTAAAACT | TCATTG | CCCAAAAACGAA | mo- | |
| | valida- | | GAATGTCATTGGTTGACCT | GTTGAC | GGGGACTAAAAC | nu- | |
| | tion | | TTGTACAT | CTTTGT | (SEQ ID. | clease | |
| | LwaCas13 | | (SEQ ID. NO: 2718) | ACAT | NO: 2720) | | |
| | a 17 | | | (SEQ ID. | | | |
| | | | | NO: | | | |
| | | | | 2719) | | | |
| 2a | thermo- | LwaCas13a | GATTTAGACTACCCCAAAA | AGGATG | GATTTAGACTAC | ther- | 2a |
| | nuclease | | ACGAAGGGGACTAAAACTT | CTTTGT | CCCAAAAACGAA | mo- | |
| | valida- | | TTTTAGGATGCTTTGTTTCA | TTCAGG | GGGGACTAAAAC | nu- | |
| | tion | | GGTGTA | TGTA | (SEQ ID. | clease | |
| | LwaCas13 | | (SEQ ID. NO: 2721) | (SEQ ID. | NO: 2723) | | |
| | a 18 | | | NO: | | | |
| | | | | 2722) | | | |
| 2a | thermo- | LwaCas13a | GATTTAGACTACCCCAAAA | TTTGTT | GATTTAGACTAC | ther- | 2a |
| | nuclease | | ACGAAGGGGACTAAAACTT | TCAGGT | CCCAAAAACGAA | mo- | |
| | valida- | | TGTTTCAGGTGTATCAACC | GTATCA | GGGGACTAAAAC | nu- | |
| | tion | | AATAATA | ACCAAT | (SEQ ID. | clease | |
| | LwaCas13 | | (SEQ ID. NO: 2724) | AATA | NO: 2726) | | |
| | a 19 | | | (SEQ ID. | | | |
| | | | | NO: | | | |
| | | | | 2725) | | | |
| 2a | thermo- | LwaCas13a | GATTTAGACTACCCCAAAA | TTGCTT | GATTTAGACTAC | ther- | 2a |
| | nuclease | | ACGAAGGGGACTAAAACTT | CAGGA | CCCAAAAACGAA | mo- | |
| | valida- | | GCTTCAGGACCATATTTCT | CCATAT | GGGGACTAAAAC | nu- | |
| | tion | | CTACACC | TTCTCT | (SEQ ID. | clease | |
| | LwaCas13 | | (SEQ ID. NO: 2727) | ACACC | NO: 2729) | | |
| | a 20 | | | (SEQ ID. | | | |
| | | | | NO: | | | |
| | | | | 2728) | | | |
| 2a | thermo- | LwaCas13a | GATTTAGACTACCCCAAAA | TCAGGT | GATTTAGACTAC | ther- | 2a |
| | nuclease | | ACGAAGGGGACTAAAACT | GTATCA | CCCAAAAACGAA | mo- | |
| | valida- | | CAGGTGTATCAACCAATAA | ACCAAT | GGGGACTAAAAC | nu- | |
| | tion | | TAGTCTGA | AATAGT | (SEQ ID. | clease | |
| | LwaCas13 | | (SEQ ID. NO: 2730) | CTGA | NO: 2732) | | |
| | a 21 | | | (SEQ ID. | | | |
| | | | | NO: | | | |
| | | | | 2731) | | | |
| 2a | thermo- | LwaCas13a | GATTTAGACTACCCCAAAA | ACTTGC | GATTTAGACTAC | ther- | 2a |
| | nuclease | | ACGAAGGGGACTAAAACA | TTCAGG | CCCAAAAACGAA | mo- | |
| | valida- | | CTTGCTTCAGGACCATATT | ACCATA | GGGGACTAAAAC | nu- | |
| | tion | | TCTCTACA | TTTCTC | (SEQ ID. | clease | |
| | LwaCas13 | | (SEQ ID. NO: 2733) | TACA | NO: 2735) | | |
| | a 22 | | | (SEQ ID. | | | |
| | | | | NO: | | | |
| | | | | 2734) | | | |
| 2a | thermo- | LwaCas13a | GATTTAGACTACCCCAAAA | TTTGTT | GATTTAGACTAC | ther- | 2a |
| | nuclease | | ACGAAGGGGACTAAAACTT | TCAGGT | CCCAAAAACGAA | mo- | |
| | valida- | | TGTTTCAGGTGTATCAACC | GTATCA | GGGGACTAAAAC | nu- | |
| | tion | | AATAATA | ACCAAT | (SEQ ID. | clease | |
| | LwaCas13 | | (SEQ ID. NO: 2736) | AATA | NO: 2738) | | |
| | a 23 | | | (SEQ ID. | | | |
| | | | | NO: | | | |
| | | | | 2737) | | | |
| 2a | thermo- | LwaCas13a | GATTTAGACTACCCCAAAA | TCTACA | GATTTAGACTAC | ther- | 2a |
| | nuclease | | ACGAAGGGGACTAAAACT | CCTTTT | CCCAAAAACGAA | mo- | |
| | valida- | | CTACACCTTTTTTAGGATG | TTAGGA | GGGGACTAAAAC | nu- | |
| | tion | | CTTTGTTT | TGCTTT | (SEQ ID. | clease | |
| | LwaCas13 | | (SEQ ID. NO: 2739) | GTTT | NO: 2741) | | |
| | a 24 | | | (SEQ ID. | | | |
| | | | | NO: | | | |
| | | | | 2740) | | | |
| 2a | thermo- | LwaCas13a | GATTTAGACTACCCCAAAA | CTTCAG | GATTTAGACTAC | ther- | 2a |
| | nuclease | | ACGAAGGGGACTAAAACC | GACCAT | CCCAAAAACGAA | mo- | |
| | valida- | | TTCAGGACCATATTTCTCT | ATTTCT | GGGGACTAAAAC | nu- | |
| | tion | | ACACCTTT | CTACAC | (SEQ ID. | clease | |
| | LwaCas13 | | (SEQ ID. NO: 2742) | CTTT | NO: 2744) | | |
| | a 25 | | | (SEQ ID. | | | |
| | | | | NO: | | | |
| | | | | 2743) | | | |
| 2a | thermo- | LwaCas13a | GATTTAGACTACCCCAAAA | TGACCT | GATTTAGACTAC | ther- | 2a |
| | nuclease | | ACGAAGGGGACTAAAACT | TTGTAC | CCCAAAAACGAA | mo- | |
| | valida- | | GACCTTTGTACATTAATTT | ATTAAT | GGGGACTAAAAC | nu- | |
| | tion | | AACAGTAT | TTAACA | (SEQ ID. | clease | |
| | LwaCas13 | | (SEQ ID. NO: 2745) | GTAT | NO: 2747) | | |
| | a 26 | | | (SEQ ID. | | | |
| | | | | NO: | | | |
| | | | | 2746) | | | |
| 2a | thermo- | LwaCas13a | GATTTAGACTACCCCAAAA | ATTGGT | GATTTAGACTAC | ther- | 2a |
| | nuclease | | ACGAAGGGGACTAAAACA | TGACCT | CCCAAAAACGAA | mo- | |
| | valida- | | TTGGTTGACCTTTGTACATT | TTGTAC | GGGGACTAAAAC | nu- | |
| | tion | | AATTTAA | ATTAAT | (SEQ ID. | clease | |
| | LwaCas13 | | (SEQ ID. NO: 2748) | TTAA | NO: 2750) | | |
| | a 27 | | | (SEQ ID. | | | |
| | | | | NO: | | | |
| | | | | 2749) | | | |
| 2a | thermo- | LwaCas13a | GATTTAGACTACCCCAAAA | GTCATT | GATTTAGACTAC | ther- | 2a |
| | nuclease | | ACGAAGGGGACTAAAACG | GGTTGA | CCCAAAAACGAA | mo- | |
| | valida- | | TCATTGGTTGACCTTTGTAC | CCTTTG | GGGGACTAAAAC | nu- | |
| | tion | | ATTAATT | TACATT | (SEQ ID. | clease | |
| | LwaCas13 | | (SEQ ID. NO: 2751) | AATT | NO: 2753) | | |
| | a 28 | | | (SEQ ID. | | | |
| | | | | NO: | | | |
| | | | | 2752) | | | |
| 2a | thermo- | LwaCas13a | GATTTAGACTACCCCAAAA | TTCTCT | GATTTAGACTAC | ther- | 2a |
| | nuclease | | ACGAAGGGGACTAAAACTT | ACACCT | CCCAAAAACGAA | mo- | |
| | valida- | | CTCTACACCTTTTTTAGGAT | TTTTTA | GGGGACTAAAAC | nu- | |
| | tion | | GCTTTG | GGATGC | (SEQ ID. | clease | |
| | LwaCas13 | | (SEQ ID. NO: 2754) | TTTG | NO: 2756) | | |
| | a 29 | | | (SEQ ID. | | | |
| | | | | NO: | | | |
| | | | | 2755) | | | |
| 2a | thermo- | LwaCas13a | GATTTAGACTACCCCAAAA | GCATTT | GATTTAGACTAC | ther- | 2a |
| | nuclease | | ACGAAGGGGACTAAAACG | TCTACC | CCCAAAAACGAA | mo- | |
| | valida- | | CATTTTCTACCATCTTTTTC | ATCTTT | GGGGACTAAAAC | nu- | |
| | tion | | GTAAATG | TTCGTA | (SEQ ID. | clease | |
| | LwaCas13 | | (SEQ ID. NO: 2757) | AATG | NO: 2759) | | |
| | a 30 | | | (SEQ ID. | | | |
| | | | | NO: | | | |
| | | | | 2758) | | | |
| 2a | APML | LwaCas13a | GATTTAGACTACCCCAAAA | GCGCCA | GATTTAGACTAC | APML | 2a |
| | long | | ACGAAGGGGACTAAAACG | CTGGCC | CCCAAAAACGAA | long | |
| | valida- | | CGCCACTGGCCACGTGGTT | ACGTGG | GGGGACTAAAAC | | |
| | tion | | GCTGTTGG | TTGCTG | (SEQ ID. | | |
| | LwaCas13 | | (SEQ ID. NO: 2760) | TTGG | NO: 2762) | | |
| | a 1 | | | (SEQ ID. | | | |
| | | | | NO: | | | |
| | | | | 2761) | | | |
| 2a | APML | LwaCas13a | GATTTAGACTACCCCAAAA | TGGCTG | GATTTAGACTAC | APML | 2a |
| | long | | ACGAAGGGGACTAAAACT | CCTCCC | CCCAAAAACGAA | long | |
| | valida- | | GGCTGCCTCCCCGGCGCCA | CGGCGC | GGGGACTAAAAC | | |
| | tion | | CTGGCCAC | CACTGG | (SEQ ID. | | |
| | LwaCas13 | | (SEQ ID. NO: 2763) | CCAC | NO: 2765) | | |
| | a 2 | | | (SEQ ID. | | | |
| | | | | NO: | | | |
| | | | | 2764) | | | |
| 2a | APML | LwaCas13a | GATTTAGACTACCCCAAAA | CTGCCT | GATTTAGACTAC | APML | 2a |
| | long | | ACGAAGGGGACTAAAACG | CCCCGG | CCCAAAAACGAA | long | |
| | valida- | | TGCCTCCCCGGCGCCACTG | CGCCAC | GGGGACTAAAAC | | |
| | tion | | GCCACGTG | TGGCCA | (SEQ ID. | | |
| | LwaCas13 | | (SEQ ID. NO: 2766) | CGTG | NO: 2768) | | |
| | a 3 | | | (SEQ ID. | | | |
| | | | | NO: | | | |
| | | | | 2767) | | | |
| 2a | APML | LwaCas13a | GATTTAGACTACCCCAAAA | GGCTGC | GATTTAGACTAC | APML | 2a |
| | long | | ACGAAGGGGACTAAAACG | CTCCCC | CCCAAAAACGAA | long | |
| | valida- | | GCTGCCTCCCCGGCGCCAC | GGCGCC | GGGGACTAAAAC | | |
| | tion | | TGGCCACG | ACTGGC | (SEQ ID. | | |
| | LwaCas13 | | (SEQ ID. NO: 2769) | CACG | NO: 2771) | | |
| | a 4 | | | (SEQ ID. | | | |
| | | | | NO: | | | |
| | | | | 2770) | | | |
| 2a | APML | LwaCas13a | GATTTAGACTACCCCAAAA | CCCCGG | GATTTAGACTAC | APML | 2a |
| | long | | ACGAAGGGGACTAAAACG | CGCCAC | CCCAAAAACGAA | long | |
| | valida- | | CCCGGCGCCACTGGCCACG | TGGCCA | GGGGACTAAAAC | | |
| | tion | | TGGTTGCT | CGTGGT | (SEQ ID. | | |
| | LwaCas13 | | (SEQ ID. NO: 2772) | TGCT | NO: 2774) | | |
| | a 5 | | | (SEQ ID. | | | |
| | | | | NO: | | | |
| | | | | 2773) | | | |
| 2a | APML | LwaCas13a | GATTTAGACTACCCCAAAA | GCTGCC | GATTTAGACTAC | APML | 2a |
| | long | | ACGAAGGGGACTAAAACG | TCCCCG | CCCAAAAACGAA | long | |
| | valida- | | CTGCCTCCCCGGCGCCACT | GCGCCA | GGGGACTAAAAC | | |
| | tion | | GGCCACGT | CTGGCC | (SEQ ID. | | |
| | LwaCas13 | | (SEQ ID. NO: 2775) | ACGT | NO: 2777) | | |
| | a 6 | | | (SEQ ID. | | | |
| | | | | NO: | | | |
| | | | | 2776) | | | |
| 2a | APML | LwaCas13a | GATTTAGACTACCCCAAAA | CGCCAC | GATTTAGACTAC | APML | 2a |
| | long | | ACGAAGGGGACTAAAACC | TGGCCA | CCCAAAAACGAA | long | |
| | valida- | | GCCACTGGCCACGTGGTTG | CGTGGT | GGGGACTAAAAC | | |
| | tion | | CTGTTGGG | TGCTGT | (SEQ ID. | | |
| | LwaCas13 | | (SEQ ID. NO: 2778) | TGGG | NO: 2780) | | |
| | a 7 | | | (SEQ ID. | | | |
| | | | | NO: | | | |
| | | | | 2779) | | | |
| 2a | APML | LwaCas13a | GATTTAGACTACCCCAAAA | CGGCGC | GATTTAGACTAC | APML | 2a |
| | long | | ACGAAGGGGACTAAAACC | CACTGG | CCCAAAAACGAA | long | |
| | valida- | | GGCGCCACTGGCCACGTGG | CCACGT | GGGGACTAAAAC | | |
| | tion | | TTGCTGTT | GGTTGC | (SEQ ID. | | |
| | LwaCas13 | | (SEQ ID. NO: 2781) | TGTT | NO: 2783) | | |
| | a 8 | | | (SEQ ID. | | | |
| | | | | NO: | | | |
| | | | | 2782) | | | |
| 2a | APML | LwaCas13a | GATTTAGACTACCCCAAAA | ATGGCT | GATTTAGACTAC | APML | 2a |
| | long | | ACGAAGGGGACTAAAACA | GCCTCC | CCCAAAAACGAA | long | |
| | valida- | | TGGCTGCCTCCCCGGCGCC | CCGGCG | GGGGACTAAAAC | | |
| | tion | | ACTGGCCA | CCACTG | (SEQ ID. | | |
| | LwaCas13 | | (SEQ ID. NO: 2784) | GCCA | NO: 2786) | | |
| | a 9 | | | (SEQ ID. | | | |
| | | | | NO: | | | |
| | | | | 2785) | | | |
| 2a | APML | LwaCas13a | GATTTAGACTACCCCAAAA | CCCGGC | GATTTAGACTAC | APML | 2a |
| | long | | ACGAAGGGGACTAAAACC | GCCACT | CCCAAAAACGAA | long | |
| | valida- | | CCGGCGCCACTGGCCACGT | GGCCAC | GGGGACTAAAAC | | |
| | tion | | GGTTGCTG | GTGGTT | (SEQ ID. | | |
| | LwaCas13 | | (SEQ ID. NO: 2787) | GCTG | NO: 2789) | | |
| | a 10 | | | (SEQ ID. | | | |
| | | | | NO: | | | |
| | | | | 2788) | | | |
| 2a | APML | LwaCas13a | GATTTAGACTACCCCAAAA | AATGGC | GATTTAGACTAC | APML | 2a |
| | long | | ACGAAGGGGACTAAAACA | TGCCTC | CCCAAAAACGAA | long | |
| | valida- | | ATGGCTGCCTCCCCGGCGC | CCCGGC | GGGGACTAAAAC | | |
| | tion | | CACTGGCC | GCCACT | (SEQ ID. | | |
| | LwaCas13 | | (SEQ ID. NO: 2790) | GGCC | NO: 2792) | | |
| | a 11 | | | (SEQ ID. | | | |
| | | | | NO: | | | |
| | | | | 2791) | | | |
| 2a | APML | LwaCas13a | GATTTAGACTACCCCAAAA | CTCCCC | GATTTAGACTAC | APML | 2a |
| | long | | ACGAAGGGGACTAAAACC | GGCGCC | CCCAAAAACGAA | long | |
| | valida- | | TCCCCGGCGCCACTGGCCA | ACTGGC | GGGGACTAAAAC | | |
| | tion | | CGTGGTTG | CACGTG | (SEQ ID. | | |
| | LwaCas13 | | (SEQ ID. NO: 2793) | GTTG | NO: 2795) | | |
| | a 12 | | | (SEQ ID. | | | |
| | | | | NO: | | | |
| | | | | 2794) | | | |
| 2a | APML | LwaCas13a | GATTTAGACTACCCCAAAA | CCTCCC | GATTTAGACTAC | APML | 2a |
| | long | | ACGAAGGGGACTAAAACC | CGGCGC | CCCAAAAACGAA | long | |
| | valida- | | CTCCCCGGCGCCACTGGCC | CACTGG | GGGGACTAAAAC | | |
| | tion | | ACGTGGTT | CCACGT | (SEQ ID. | | |
| | LwaCas13 | | (SEQ ID. NO: 2796) | GGTT | NO: 2798) | | |
| | a 13 | | | (SEQ ID. | | | |
| | | | | NO: | | | |
| | | | | 2797) | | | |
| 2a | APML | LwaCas13a | GATTTAGACTACCCCAAAA | TCAATG | GATTTAGACTAC | APML | 2a |
| | long | | ACGAAGGGGACTAAAACT | GCTGCC | CCCAAAAACGAA | long | |
| | valida- | | CAATGGCTGCCTCCCCGGC | TCCCCG | GGGGACTAAAAC | | |
| | tion | | GCCACTGG | GCGCCA | (SEQ ID. | | |
| | LwaCas13 | | (SEQ ID. NO: 2799) | CTGG | NO: 2801) | | |
| | a 14 | | | (SEQ ID. | | | |
| | | | | NO: | | | |
| | | | | 2800) | | | |
| 2a | APML | LwaCas13a | GATTTAGACTACCCCAAAA | CCGGCG | GATTTAGACTAC | APML | 2a |
| | long | | ACGAAGGGGACTAAAACC | CCACTG | CCCAAAAACGAA | long | |
| | valida- | | CGGCGCCACTGGCCACGTG | GCCACG | GGGGACTAAAAC | | |
| | tion | | GTTGCTGT | TGGTTG | (SEQ ID. | | |
| | LwaCas13 | | (SEQ ID. NO: 2802) | CTGT | NO: 2804) | | |
| | a 15 | | | (SEQ ID. | | | |
| | | | | NO: | | | |
| | | | | 2803) | | | |
| 2a | APML | LwaCas13a | GATTTAGACTACCCCAAAA | CAATGG | GATTTAGACTAC | APML | 2a |
| | long | | ACGAAGGGGACTAAAACC | CTGCCT | CCCAAAAACGAA | long | |
| | valida- | | AATGGCTGCCTCCCCGGCG | CCCCGG | GGGGACTAAAAC | | |
| | tion | | CCACTGGC | CGCCAC | (SEQ ID. | | |
| | LwaCas13 | | (SEQ ID. NO: 2805) | TGGC | NO: 2807) | | |
| | a 16 | | | (SEQ ID. | | | |
| | | | | NO: | | | |
| | | | | 2806) | | | |
| 2a | APML | LwaCas13a | GATTTAGACTACCCCAAAA | TGCCTC | GATTTAGACTAC | APML | 2a |
| | long | | ACGAAGGGGACTAAAACT | CCCGGC | CCCAAAAACGAA | long | |
| | valida- | | GCCTCCCCGGCGCCACTGG | GCCACT | GGGGACTAAAAC | | |
| | tion | | CCACGTGG | GGCCAC | (SEQ ID. | | |
| | LwaCas13 | | (SEQ ID. NO: 2808) | GTGG | NO: 2810) | | |
| | a 17 | | | (SEQ ID. | | | |
| | | | | NO: | | | |
| | | | | 2809) | | | |
| 2a | APML | LwaCas13a | GATTTAGACTACCCCAAAA | TCCCCG | GATTTAGACTAC | APML | 2a |
| | long | | ACGAAGGGGACTAAAACT | GCGCCA | CCCAAAAACGAA | long | |
| | valida- | | CCCCGGCGCCACTGGCCAC | CTGGCC | GGGGACTAAAAC | | |
| | tion | | GTGGTTGC | ACGTGG | (SEQ ID. | | |
| | LwaCas13 | | (SEQ ID. NO: 2811) | TTGC | NO: 2813) | | |
| | a 18 | | | (SEQ ID. | | | |
| | | | | NO: | | | |
| | | | | 2812) | | | |
| 2a | APML | LwaCas13a | GATTTAGACTACCCCAAAA | GGCGCC | GATTTAGACTAC | APML | 2a |
| | long | | ACGAAGGGGACTAAAACG | ACTGGC | CCCAAAAACGAA | long | |
| | valida- | | GCGCCACTGGCCACGTGGT | CACGTG | GGGGACTAAAAC | | |
| | tion | | TGCTGTTG | GTTGCT | (SEQ ID. | | |
| | LwaCas13 | | (SEQ ID. NO: 2814) | GTTG | NO: 2816) | | |
| | a 19 | | | (SEQ ID. | | | |
| | | | | NO: | | | |
| | | | | 2815) | | | |
| 2a | APML | LwaCas13a | GATTTAGACTACCCCAAAA | GCCTCC | GATTTAGACTAC | APML | 2a |
| | long | | ACGAAGGGGACTAAAACG | CCGGCG | CCCAAAAACGAA | long | |
| | valida- | | CCTCCCCGGCGCCACTGGC | CCACTG | GGGGACTAAAAC | | |
| | tion | | CACGTGGT | GCCACG | (SEQ ID. | | |
| | LwaCas13 | | (SEQ ID. NO: 2817) | TGGT | NO: 2819) | | |
| | a 20 | | | (SEQ ID. | | | |
| | | | | NO: | | | |
| | | | | 2818) | | | |
| 2a | APML | LwaCas13a | GATTTAGACTACCCCAAAA | TCTCAA | GATTTAGACTAC | APML | 2a |
| | short | | ACGAAGGGGACTAAAACT | TGGCTT | CCCAAAAACGAA | short | |
| | valida- | | CTCAATGGCTTTCCCCTGG | TCCCCT | GGGGACTAAAAC | | |
| | tion | | GTGATGCA | GGGTGA | (SEQ ID. | | |
| | LwaCas13 | | (SEQ ID. NO: 2820) | TGCA | NO: 2822) | | |
| | a 1 | | | (SEQ ID. | | | |
| | | | | NO: | | | |
| | | | | 2821) | | | |
| 2a | APML | LwaCas13a | GATTTAGACTACCCCAAAA | ATGGCT | GATTTAGACTAC | APML | 2a |
| | short | | ACGAAGGGGACTAAAACA | TTCCCC | CCCAAAAACGAA | short | |
| | valida- | | TGGCTTTCCCCTGGGTGAT | TGGGTG | GGGGACTAAAAC | | |
| | tion | | GCAAGAGC | ATGCAA | (SEQ ID. | | |
| | LwaCas13 | | (SEQ ID. NO: 2823) | GAGC | NO: 2825) | | |
| | a 2 | | | (SEQ ID. | | | |
| | | | | NO: | | | |
| | | | | 2824) | | | |
| 2a | APML | LwaCas13a | GATTTAGACTACCCCAAAA | AATGGC | GATTTAGACTAC | APML | 2a |
| | short | | ACGAAGGGGACTAAAACA | TTTCCC | CCCAAAAACGAA | short | |
| | valida- | | ATGGCTTTCCCCTGGGTGA | CTGGGT | GGGGACTAAAAC | | |
| | tion | | TGCAAGAG | GATGCA | (SEQ ID. | | |
| | LwaCas13 | | (SEQ ID. NO: 2826) | AGAG | NO: 2828) | | |
| | a 3 | | | (SEQ ID. | | | |
| | | | | NO: | | | |
| | | | | 2827) | | | |
| 2a | APML | LwaCas13a | GATTTAGACTACCCCAAAA | GGGTGA | GATTTAGACTAC | APML | 2a |
| | short | | ACGAAGGGGACTAAAACG | TGCAAG | CCCAAAAACGAA | short | |
| | valida- | | GGTGATGCAAGAGCTGAG | AGCTGA | GGGGACTAAAAC | | |
| | tion | | GTCCTGCAG | GGTCCT | (SEQ ID. | | |
| | LwaCas13 | | (SEQ ID. NO: 2829) | GCAG | NO: 2831) | | |
| | a 4 | | | (SEQ ID. | | | |
| | | | | NO: | | | |
| | | | | 2830) | | | |
| 2a | APML | LwaCas13a | GATTTAGACTACCCCAAAA | TGGCTT | GATTTAGACTAC | APML | 2a |
| | short | | ACGAAGGGGACTAAAACT | TCCCCT | CCCAAAAACGAA | short | |
| | valida- | | GGCTTTCCCCTGGGTGATG | GGGTGA | GGGGACTAAAAC | | |
| | tion | | CAAGAGCT | TGCAAG | (SEQ ID. | | |
| | LwaCas13 | | (SEQ ID. NO: 2832) | AGCT | NO: 2834) | | |
| | a 5 | | | (SEQ ID. | | | |
| | | | | NO: | | | |
| | | | | 2833) | | | |
| 2a | APML | LwaCas13a | GATTTAGACTACCCCAAAA | CTCAAT | GATTTAGACTAC | APML | 2a |
| | short | | ACGAAGGGGACTAAAACG | GGCTTT | CCCAAAAACGAA | short | |
| | valida- | | TCAATGGCTTTCCCCTGGG | CCCCTG | GGGGACTAAAAC | | |
| | tion | | TGATGCAA | GGTGAT | (SEQ ID. | | |
| | LwaCas13 | | (SEQ ID. NO: 2835) | GCAA | NO: 2837) | | |
| | a 6 | | | (SEQ ID. | | | |
| | | | | NO: | | | |
| | | | | 2836) | | | |
| 2a | APML | LwaCas13a | GATTTAGACTACCCCAAAA | TTCCCC | GATTTAGACTAC | APML | 2a |
| | short | | ACGAAGGGGACTAAAACTT | TGGGTG | CCCAAAAACGAA | short | |
| | valida- | | CCCCTGGGTGATGCAAGAG | ATGCAA | GGGGACTAAAAC | | |
| | tion | | CTGAGGT | GAGCTG | (SEQ ID. | | |
| | LwaCas13 | | (SEQ ID. NO: 2838) | AGGT | NO: 2840) | | |
| | a 7 | | | (SEQ ID. | | | |
| | | | | NO: | | | |
| | | | | 2839) | | | |
| 2a | APML | LwaCas13a | GATTTAGACTACCCCAAAA | GCTTTC | GATTTAGACTAC | APML | 2a |
| | short | | ACGAAGGGGACTAAAACG | CCCTGG | CCCAAAAACGAA | short | |
| | valida- | | CTTTCCCCTGGGTGATGCA | GTGATG | GGGGACTAAAAC | | |
| | tion | | AGAGCTGA | CAAGA | (SEQ ID. | | |
| | LwaCas13 | | (SEQ ID. NO: 2841) | GCTGA | NO: 2843) | | |
| | a 8 | | | (SEQ ID. | | | |
| | | | | NO: | | | |
| | | | | 2842) | | | |
| 2a | APML | LwaCas13a | GATTTAGACTACCCCAAAA | TCCCCT | GATTTAGACTAC | APML | 2a |
| | short | | ACGAAGGGGACTAAAACT | GGGTGA | CCCAAAAACGAA | short | |
| | valida- | | CCCCTGGGTGATGCAAGAG | TGCAAG | GGGGACTAAAAC | | |
| | tion | | CTGAGGTC | AGCTGA | (SEQ ID. | | |
| | LwaCas13 | | (SEQ ID. NO: 2844) | GGTC | NO: 2846) | | |
| | a 9 | | | (SEQ ID. | | | |
| | | | | NO: | | | |
| | | | | 2845) | | | |
| 2a | APML | LwaCas13a | GATTTAGACTACCCCAAAA | CTTTCC | GATTTAGACTAC | APML | 2a |
| | short | | ACGAAGGGGACTAAAACC | CCTGGG | CCCAAAAACGAA | short | |
| | valida- | | TTTCCCCTGGGTGATGCAA | TGATGC | GGGGACTAAAAC | | |
| | tion | | GAGCTGAG | AAGAG | (SEQ ID. | | |
| | LwaCas13 | | (SEQ ID. NO: 2847) | CTGAG | NO: 2849) | | |
| | a 10 | | | (SEQ ID. | | | |
| | | | | NO: | | | |
| | | | | 2848) | | | |
| 2a | APML | LwaCas13a | GATTTAGACTACCCCAAAA | CAATGG | GATTTAGACTAC | APML | 2a |
| | short | | ACGAAGGGGACTAAAACC | CTTTCC | CCCAAAAACGAA | short | |
| | valida- | | AATGGCTTTCCCCTGGGTG | CCTGGG | GGGGACTAAAAC | | |
| | tion | | ATGCAAGA | TGATGC | (SEQ ID. | | |
| | LwaCas13 | | (SEQ ID. NO: 2850) | AAGA | NO: 2852) | | |
| | a 11 | | | (SEQ ID. | | | |
| | | | | NO: | | | |
| | | | | 2851) | | | |
| 2a | APML | LwaCas13a | GATTTAGACTACCCCAAAA | CCTGGG | GATTTAGACTAC | APML | 2a |
| | short | | ACGAAGGGGACTAAAACC | TGATGC | CCCAAAAACGAA | short | |
| | valida- | | CTGGGTGATGCAAGAGCTG | AAGAG | GGGGACTAAAAC | | |
| | tion | | AGGTCCTG | CTGAGG | (SEQ ID. | | |
| | LwaCas13 | | (SEQ ID. NO: 2853) | TCCTG | NO: 2855) | | |
| | a 12 | | | (SEQ ID. | | | |
| | | | | NO: | | | |
| | | | | 2854) | | | |
| 2a | APML | LwaCas13a | GATTTAGACTACCCCAAAA | GGTCTC | GATTTAGACTAC | APML | 2a |
| | short | | ACGAAGGGGACTAAAACG | AATGGC | CCCAAAAACGAA | short | |
| | valida- | | GTCTCAATGGCTTTCCCCT | TTTCCC | GGGGACTAAAAC | | |
| | tion | | GGGTGATG | CTGGGT | (SEQ ID. | | |
| | LwaCas13 | | (SEQ ID. NO: 2856) | GATG | NO: 2858) | | |
| | a 13 | | | (SEQ ID. | | | |
| | | | | NO: | | | |
| | | | | 2857) | | | |
| 2a | APML | LwaCas13a | GATTTAGACTACCCCAAAA | GGGTCT | GATTTAGACTAC | APML | 2a |
| | short | | ACGAAGGGGACTAAAACG | CAATGG | CCCAAAAACGAA | short | |
| | valida- | | GGTCTCAATGGCTTTCCCC | CTTTCC | GGGGACTAAAAC | | |
| | tion | | TGGGTGAT | CCTGGG | (SEQ ID. | | |
| | LwaCas13 | | (SEQ ID. NO: 2859) | TGAT | NO: 2861) | | |
| | a 14 | | | (SEQ ID. | | | |
| | | | | NO: | | | |
| | | | | 2860) | | | |
| 2a | APML | LwaCas13a | GATTTAGACTACCCCAAAA | GGCTTT | GATTTAGACTAC | APML | 2a |
| | short | | ACGAAGGGGACTAAAACG | CCCCTG | CCCAAAAACGAA | short | |
| | valida- | | GCTTTCCCCTGGGTGATGC | GGTGAT | GGGGACTAAAAC | | |
| | tion | | AAGAGCTG | GCAAG | (SEQ ID. | | |
| | LwaCas13 | | (SEQ ID. NO: 2862) | AGCTG | NO: 2864) | | |
| | a 15 | | | (SEQ ID. | | | |
| | | | | NO: | | | |
| | | | | 2863) | | | |
| 2a | APML | LwaCas13a | GATTTAGACTACCCCAAAA | TTTCCC | GATTTAGACTAC | APML | 2a |
| | short | | ACGAAGGGGACTAAAACTT | CTGGGT | CCCAAAAACGAA | short | |
| | valida- | | TCCCCTGGGTGATGCAAGA | GATGCA | GGGGACTAAAAC | | |
| | tion | | GCTGAGG | AGAGCT | (SEQ ID. | | |
| | LwaCas13 | | (SEQ ID. NO: 2865) | GAGG | NO: 2867) | | |
| | a 16 | | | (SEQ ID. | | | |
| | | | | NO: | | | |
| | | | | 2866) | | | |
| 2a | APML | LwaCas13a | GATTTAGACTACCCCAAAA | CCCCTG | GATTTAGACTAC | APML | 2a |
| | short | | ACGAAGGGGACTAAAACG | GGTGAT | CCCAAAAACGAA | short | |
| | valida- | | CCCTGGGTGATGCAAGAGC | GCAAG | GGGGACTAAAAC | | |
| | tion | | TGAGGTCC | AGCTGA | (SEQ ID. | | |
| | LwaCas13 | | (SEQ ID. NO: 2868) | GGTCC | NO: 2870) | | |
| | a 17 | | | (SEQ ID. | | | |
| | | | | NO: | | | |
| | | | | 2869) | | | |
| 2a | APML | LwaCas13a | GATTTAGACTACCCCAAAA | TGGGTG | GATTTAGACTAC | APML | 2a |
| | short | | ACGAAGGGGACTAAAACT | ATGCAA | CCCAAAAACGAA | short | |
| | valida- | | GGGTGATGCAAGAGCTGA | GAGCTG | GGGGACTAAAAC | | |
| | tion | | GGTCCTGCA | AGGTCC | (SEQ ID. | | |
| | LwaCas13 | | (SEQ ID. NO: 2871) | TGCA | NO: 2873) | | |
| | a 18 | | | (SEQ ID. | | | |
| | | | | NO: | | | |
| | | | | 2872) | | | |
| 2a | APML | LwaCas13a | GATTTAGACTACCCCAAAA | GTCTCA | GATTTAGACTAC | APML | 2a |
| | short | | ACGAAGGGGACTAAAACG | ATGGCT | CCCAAAAACGAA | short | |
| | valida- | | TCTCAATGGCTTTCCCCTG | TTCCCC | GGGGACTAAAAC | | |
| | tion | | GGTGATGC | TGGGTG | (SEQ ID. | | |
| | LwaCas13 | | (SEQ ID. NO: 2874) | ATGC | NO: 2876) | | |
| | a 19 | | | (SEQ ID. | | | |
| | | | | NO: | | | |
| | | | | 2875) | | | |
| 2a | APML | LwaCas13a | GATTTAGACTACCCCAAAA | CTGGGT | GATTTAGACTAC | APML | 2a |
| | short | | ACGAAGGGGACTAAAACC | GATGCA | CCCAAAAACGAA | short | |
| | valida- | | TGGGTGATGCAAGAGCTGA | AGAGCT | GGGGACTAAAAC | | |
| | tion | | GGTCCTGC | GAGGTC | (SEQ ID. | | |
| | LwaCas13 | | (SEQ ID. NO: 2877) | CTGC | NO: 2879) | | |
| | a 20 | | | (SEQ ID. | | | |
| | | | | NO: | | | |
| | | | | 2878) | | | |
| 2a | APML | LwaCas13a | GATTTAGACTACCCCAAAA | CCCTGG | GATTTAGACTAC | APML | 2a |
| | short | | ACGAAGGGGACTAAAACC | GTGATG | CCCAAAAACGAA | short | |
| | valida- | | CCTGGGTGATGCAAGAGCT | CAAGA | GGGGACTAAAAC | | |
| | tion | | GAGGTCCT | GCTGAG | (SEQ ID. | | |
| | LwaCas13 | | (SEQ ID. NO: 2880) | GTCCT | NO: 2882) | | |
| | a 21 | | | (SEQ ID. | | | |
| | | | | NO: | | | |
| | | | | 2881) | | | |
| 2a | APML | LwaCas13a | GATTTAGACTACCCCAAAA | TCAATG | GATTTAGACTAC | APML | 2a |
| | short | | ACGAAGGGGACTAAAACT | GCTTTC | CCCAAAAACGAA | short | |
| | valida- | | CAATGGCTTTCCCCTGGGT | CCCTGG | GGGGACTAAAAC | | |
| | tion | | GATGCAAG | GTGATG | (SEQ ID. | | |
| | LwaCas13 | | (SEQ ID. NO: 2883) | CAAG | NO: 2885) | | |
| | a 22 | | | (SEQ ID. | | | |
| | | | | NO: | | | |
| | | | | 2884) | | | |
| 2a | APML | LwaCas13a | GATTTAGACTACCCCAAAA | TGGGTC | GATTTAGACTAC | APML | 2a |
| | short | | ACGAAGGGGACTAAAACT | TCAATG | CCCAAAAACGAA | short | |
| | valida- | | GGGTCTCAATGGCTTTCCC | GCTTTC | GGGGACTAAAAC | | |
| | tion | | CTGGGTGA | CCCTGG | (SEQ ID. | | |
| | LwaCas13 | | (SEQ ID. NO: 2886) | GTGA | NO: 2888) | | |
| | a 23 | | | (SEQ ID. | | | |
| | | | | NO: | | | |
| | | | | 2887) | | | |
| 2b | APML | CcaCas13b | cggcgccactggccacgtggttgct | cggcgccac | GTTGGAACTGCT | APML | 2b |
| | long | | gttggGTTGGAACTGCTCTCATTTT | tggccacgt | CTCATTTTGGAGG | long | |
| | valida- | | GGAGGGTAATCACAAC | ggttgctgtt | GTAATCACAAC | | |
| | tion | | (SEQ ID. NO: 2889) | gg (SEQ | (SEQ ID. | | |
| | CcaCas13 | | | ID. NO: | NO: 2891) | | |
| | b 1 | | | 2890) | | | |
| 2b | APML | CcaCas13b | ccggcgccactggccacgtggttgc | ccggcgcca | GTTGGAACTGCT | APML | 2b |
| | long | | tgttgGTTGGAACTGCTCTCATTTT | ctggccacg | CTCATTTTGGAGG | long | |
| | valida- | | GGAGGGTAATCACAAC | tggttgctgtt | GTAATCACAAC | | |
| | tion | | (SEQ ID. NO: 2892) | g (SEQ | (SEQ ID. | | |
| | CcaCas13 | | | ID. NO: | NO: 2894) | | |
| | b 2 | | | 2893) | | | |
| 2b | APML | CcaCas13b | cccggcgccactggccacgtggttg | cccggcgcc | GTTGGAACTGCT | APML | 2b |
| | long | | ctgttGTTGGAACTGCTCTCATTTT | actggccac | CTCATTTTGGAGG | long | |
| | valida- | | GGAGGGTAATCACAAC | gtggttgctg | GTAATCACAAC | | |
| | tion | | (SEQ ID. NO: 2895) | tt (SEQ | (SEQ ID. | | |
| | CcaCas13 | | | ID. NO: | NO: 2897) | | |
| | b 3 | | | 2896) | | | |
| 2b | APML | CcaCas13b | ccccggcgccactggccacgtggtt | ccccggcgc | GTTGGAACTGCT | APML | 2b |
| | long | | gctgtGTTGGAACTGCTCTCATTTT | cactggcca | CTCATTTTGGAGG | long | |
| | valida- | | GGAGGGTAATCACAAC | cgtggttgct | GTAATCACAAC | | |
| | tion | | (SEQ ID. NO: 2898) | gt (SEQ | (SEQ ID. | | |
| | CcaCas13 | | | ID. NO: | NO: 2900) | | |
| | b 4 | | | 2899) | | | |
| 2b | APML | CcaCas13b | tccccggcgccactggccacgtggt | tccccggcg | GTTGGAACTGCT | APML | 2b |
| | long | | tgctgGTTGGAACTGCTCTCATTTT | ccactggcc | CTCATTTTGGAGG | long | |
| | valida- | | GGAGGGTAATCACAAC | acgtggttgc | GTAATCACAAC | | |
| | tion | | (SEQ ID. NO: 2901) | tg (SEQ | (SEQ ID. | | |
| | CcaCas13 | | | ID. NO: | NO: 2903) | | |
| | b 5 | | | 2902) | | | |
| 2b | APML | CcaCas13b | ctccccggcgccactggccacgtgg | ctccccggc | GTTGGAACTGCT | APML | 2b |
| | long | | ttgctGTTGGAACTGCTCTCATTTT | gccactggc | CTCATTTTGGAGG | long | |
| | valida- | | GGAGGGTAATCACAAC | cacgtggttg | GTAATCACAAC | | |
| | tion | | (SEQ ID. NO: 2904) | ct (SEQ | (SEQ ID. | | |
| | CcaCas13 | | | ID. NO: | NO: 2906) | | |
| | b 6 | | | 2905) | | | |
| 2b | APML | CcaCas13b | cctccccggcgccactggccacgtg | cctccccgg | GTTGGAACTGCT | APML | 2b |
| | long | | gttgcGTTGGAACTGCTCTCATTTT | cgccactgg | CTCATTTTGGAGG | long | |
| | valida- | | GGAGGGTAATCACAAC | ccacgtggtt | GTAATCACAAC | | |
| | tion | | (SEQ ID. NO: 2907) | gc (SEQ | (SEQ ID. | | |
| | CcaCas13 | | | ID. NO: | NO: 2909) | | |
| | b 7 | | | 2908) | | | |
| 2b | APML | CcaCas13b | gcctccccggcgccactggccacgt | gcctccccg | GTTGGAACTGCT | APML | 2b |
| | long | | ggttgGTTGGAACTGCTCTCATTTT | gcgccactg | CTCATTTTGGAGG | long | |
| | valida- | | GGAGGGTAATCACAAC | gccacgtgg | GTAATCACAAC | | |
| | tion | | (SEQ ID. NO: 2910) | ttg (SEQ | (SEQ ID. | | |
| | CcaCas13 | | | ID. NO: | NO: 2912) | | |
| | b 8 | | | 2911) | | | |
| 2b | APML | CcaCas13b | tgcctccccggcgccactggccacg | tgcctccccg | GTTGGAACTGCT | APML | 2b |
| | long | | tggttGTTGGAACTGCTCTCATTTT | gcgccactg | CTCATTTTGGAGG | long | |
| | valida- | | GGAGGGTAATCACAAC | gccacgtgg | GTAATCACAAC | | |
| | tion | | (SEQ ID. NO: 2913) | tt (SEQ | (SEQ ID. | | |
| | CcaCas13 | | | ID. NO: | NO: 2915) | | |
| | b 9 | | | 2914) | | | |
| 2b | APML | CcaCas13b | ctgcctccccggcgccactggccac | ctgcctcccc | GTTGGAACTGCT | APML | 2b |
| | long | | gtggtGTTGGAACTGCTCTCATTTT | ggcgccact | CTCATTTTGGAGG | long | |
| | valida- | | GGAGGGTAATCACAAC | ggccacgtg | GTAATCACAAC | | |
| | tion | | (SEQ ID. NO: 2916) | gt(SEQ | (SEQ ID. | | |
| | CcaCas13 | | | ID. NO: | NO: 2918) | | |
| | b 10 | | | 2917) | | | |
| 2b | APML | CcaCas13b | gctgcctccccggcgccactggcca | gctgcctccc | GTTGGAACTGCT | APML | 2b |
| | long | | cgtggGTTGGAACTGCTCTCATTTT | cggcgccac | CTCATTTTGGAGG | long | |
| | valida- | | GGAGGGTAATCACAAC | tggccacgt | GTAATCACAAC | | |
| | tion | | (SEQ ID. NO: 2919) | gg (SEQ | (SEQ ID. | | |
| | CcaCas13 | | | ID. NO: | NO: 2921) | | |
| | b 11 | | | 2920) | | | |
| 2b | APML | CcaCas13b | ggctgcctccccggcgccactggcc | ggctgcctc | GTTGGAACTGCT | APML | 2b |
| | long | | acgtgGTTGGAACTGCTCTCATTTT | cccggcgcc | CTCATTTTGGAGG | long | |
| | valida- | | GGAGGGTAATCACAAC | actggccac | GTAATCACAAC | | |
| | tion | | (SEQ ID. NO: 2922) | gtg (SEQ | (SEQ ID. | | |
| | CcaCas13 | | | ID. NO: | NO: 2924) | | |
| | b 12 | | | 2923) | | | |
| 2b | APML | CcaCas13b | tggctgcctccccggcgccactggc | tggctgcctc | GTTGGAACTGCT | APML | 2b |
| | long | | cacgtGTTGGAACTGCTCTCATTTT | cccggcgcc | CTCATTTTGGAGG | long | |
| | valida- | | GGAGGGTAATCACAAC | actggccac | GTAATCACAAC | | |
| | tion | | (SEQ ID. NO: 2925) | gt (SEQ | (SEQ ID. | | |
| | CcaCas13 | | | ID. NO: | NO: 2927) | | |
| | b 13 | | | 2926) | | | |
| 2b | APML | CcaCas13b | atggctgcctccccggcgccactgg | atggctgcct | GTTGGAACTGCT | APML | 2b |
| | long | | ccacgGTTGGAACTGCTCTCATTTT | ccccggcgc | CTCATTTTGGAGG | long | |
| | valida- | | GGAGGGTAATCACAAC | cactggcca | GTAATCACAAC | | |
| | tion | | (SEQ ID. NO: 2928) | cg (SEQ | (SEQ ID. | | |
| | CcaCas13 | | | ID. NO: | NO: 2930) | | |
| | b 14 | | | 2929) | | | |
| 2b | APML | CcaCas13b | aatggctgcctccccggcgccactg | aatggctgc | GTTGGAACTGCT | APML | 2b |
| | long | | gccacGTTGGAACTGCTCTCATTTT | ctccccggc | CTCATTTTGGAGG | long | |
| | valida- | | GGAGGGTAATCACAAC | gccactggc | GTAATCACAAC | | |
| | tion | | (SEQ ID. NO: 2931) | cac (SEQ | (SEQ ID. | | |
| | CcaCas13 | | | ID. NO: | NO: 2933) | | |
| | b 15 | | | 2932) | | | |
| 2b | APML | CcaCas13b | caatggctgcctccccggcgccact | caatggctg | GTTGGAACTGCT | APML | 2b |
| | long | | ggccaGTTGGAACTGCTCTCATTTT | cctccccgg | CTCATTTTGGAGG | long | |
| | valida- | | GGAGGGTAATCACAAC | cgccactgg | GTAATCACAAC | | |
| | tion | | (SEQ ID. NO: 2934) | cca (SEQ | (SEQ ID. | | |
| | CcaCas13 | | | ID. NO: | NO: 2936) | | |
| | b 16 | | | 2935) | | | |
| 2b | APML | CcaCas13b | ctgggtgatgcaagagctgaggtcc | ctgggtgatg | GTTGGAACTGCT | APML | 2b |
| | short | | tgcagGTTGGAACTGCTCTCATTTT | caagagctg | CTCATTTTGGAGG | short | |
| | valida- | | GGAGGGTAATCACAAC | aggtcctgc | GTAATCACAAC | | |
| | tion | | (SEQ ID. NO: 2937) | ag (SEQ | (SEQ ID. | | |
| | CcaCas13 | | | ID. NO: | NO: 2939) | | |
| | b 1 | | | 2938) | | | |
| 2b | APML | CcaCas13b | cctgggtgatgcaagagctgaggtc | cctgggtgat | GTTGGAACTGCT | APML | 2b |
| | short | | ctgcaGTTGGAACTGCTCTCATTTT | gcaagagct | CTCATTTTGGAGG | short | |
| | valida- | | GGAGGGTAATCACAAC | gaggtcctg | GTAATCACAAC | | |
| | tion | | (SEQ ID. NO: 2940) | ca (SEQ | (SEQ ID. | | |
| | CcaCas13 | | | ID. NO: | NO: 2942) | | |
| | b 2 | | | 2941) | | | |
| 2b | APML | CcaCas13b | ccctgggtgatgcaagagctgaggt | ccctgggtg | GTTGGAACTGCT | APML | 2b |
| | short | | cctgcGTTGGAACTGCTCTCATTTT | atgcaagag | CTCATTTTGGAGG | short | |
| | valida- | | GGAGGGTAATCACAAC | ctgaggtcct | GTAATCACAAC | | |
| | tion | | (SEQ ID. NO: 2943) | gc (SEQ | (SEQ ID. | | |
| | CcaCas13 | | | ID. NO: | NO: 2945) | | |
| | b 3 | | | 2944) | | | |
| 2b | APML | CcaCas13b | cccctgggtgatgcaagagctgagg | cccctgggt | GTTGGAACTGCT | APML | 2b |
| | short | | tcctgGTTGGAACTGCTCTCATTTT | gatgcaaga | CTCATTTTGGAGG | short | |
| | valida- | | GGAGGGTAATCACAAC | gctgaggtc | GTAATCACAAC | | |
| | tion | | (SEQ ID. NO: 2946) | ctg (SEQ | (SEQ ID. | | |
| | CcaCas13 | | | ID. NO: | NO: 2948) | | |
| | b 4 | | | 2947) | | | |
| 2b | APML | CcaCas13b | tcccctgggtgatgcaagagctgag | tcccctgggt | GTTGGAACTGCT | APML | 2b |
| | short | | gtcctGTTGGAACTGCTCTCATTTT | gatgcaaga | CTCATTTTGGAGG | short | |
| | valida- | | GGAGGGTAATCACAAC | gctgaggtc | GTAATCACAAC | | |
| | tion | | (SEQ ID. NO: 2949) | ct (SEQ | (SEQ ID. | | |
| | CcaCas13 | | | ID. NO: | NO: 2951) | | |
| | b 5 | | | 2950) | | | |
| 2b | APML | CcaCas13b | ttcccctgggtgatgcaagagctga | ttcccctggg | GTTGGAACTGCT | APML | 2b |
| | short | | ggtccGTTGGAACTGCTCTCATTTT | tgatgcaag | CTCATTTTGGAGG | short | |
| | valida- | | GGAGGGTAATCACAAC | agctgaggt | GTAATCACAAC | | |
| | tion | | (SEQ ID. NO: 2952) | cc (SEQ | (SEQ ID. | | |
| | CcaCas13 | | | ID. NO: | NO: 2954) | | |
| | b 6 | | | 2953) | | | |
| 2b | APML | CcaCas13b | tttcccctgggtgatgcaagagctg | tttcccctgg | GTTGGAACTGCT | APML | 2b |
| | short | | aggtcGTTGGAACTGCTCTCATTTT | gtgatgcaa | CTCATTTTGGAGG | short | |
| | valida- | | GGAGGGTAATCACAAC | gagctgagg | GTAATCACAAC | | |
| | tion | | (SEQ ID. NO: 2955) | tc (SEQ | (SEQ ID. | | |
| | CcaCas13 | | | ID. NO: | NO: 2957) | | |
| | b 7 | | | 2956) | | | |
| 2b | APML | CcaCas13b | ctttcccctgggtgatgcaagagct | ctttcccctg | GTTGGAACTGCT | APML | 2b |
| | short | | gaggtGTTGGAACTGCTCTCATTTT | ggtgatgca | CTCATTTTGGAGG | short | |
| | valida- | | GGAGGGTAATCACAAC | agagctgag | GTAATCACAAC | | |
| | tion | | (SEQ ID. NO: 2958) | gt (SEQ | (SEQ ID. | | |
| | CcaCas13 | | | ID. NO: | NO: 2960) | | |
| | b 8 | | | 2959) | | | |
| 2b | APML | CcaCas13b | gctttcccctgggtgatgcaagagc | gctttcccct | GTTGGAACTGCT | APML | 2b |
| | short | | tgaggGTTGGAACTGCTCTCATTTT | gggtgatgc | CTCATTTTGGAGG | short | |
| | valida- | | GGAGGGTAATCACAAC | aagagctga | GTAATCACAAC | | |
| | tion | | (SEQ ID. NO: 2961) | gg (SEQ | (SEQ ID. | | |
| | CcaCas13 | | | ID. NO: | NO: 2963) | | |
| | b 9 | | | 2962) | | | |
| 2b | APML | CcaCas13b | ggctttcccctgggtgatgcaagag | ggctttcccc | GTTGGAACTGCT | APML | 2b |
| | short | | ctgagGTTGGAACTGCTCTCATTTT | tgggtgatgc | CTCATTTTGGAGG | short | |
| | valida- | | GGAGGGTAATCACAAC | aagagctga | GTAATCACAAC | | |
| | tion | | (SEQ ID. NO: 2964) | g (SEQ | (SEQ ID. | | |
| | CcaCas13 | | | ID. NO: | NO: 2966) | | |
| | b 10 | | | 2965) | | | |
| 2b | APML | CcaCas13b | tggctttcccctgggtgatgcaaga | tggctttccc | GTTGGAACTGCT | APML | 2b |
| | short | | gctgaGTTGGAACTGCTCTCATTTT | ctgggtgatg | CTCATTTTGGAGG | short | |
| | valida- | | GGAGGGTAATCACAAC | caagagctg | GTAATCACAAC | | |
| | tion | | (SEQ ID. NO: 2967) | a (SEQ | (SEQ ID. | | |
| | CcaCas13 | | | ID. NO: | NO: 2969) | | |
| | b 11 | | | 2968) | | | |
| 2b | APML | CcaCas13b | atggctttcccctgggtgatgcaag | atggctttcc | GTTGGAACTGCT | APML | 2b |
| | short | | agctgGTTGGAACTGCTCTCATTTT | cctgggtgat | CTCATTTTGGAGG | short | |
| | valida- | | GGAGGGTAATCACAAC | gcaagagct | GTAATCACAAC | | |
| | tion | | (SEQ ID. NO: 2970) | g (SEQ | (SEQ ID. | | |
| | CcaCas13 | | | ID. NO: | NO: 2972) | | |
| | b 12 | | | 2971) | | | |
| 2b | APML | CcaCas13b | aatggctttcccctgggtgatgcaa | aatggctttc | GTTGGAACTGCT | APML | 2b |
| | short | | gagctGTTGGAACTGCTCTCATTTT | ccctgggtg | CTCATTTTGGAGG | short | |
| | valida- | | GGAGGGTAATCACAAC | atgcaagag | GTAATCACAAC | | |
| | tion | | (SEQ ID. NO: 2973) | ct (SEQ | (SEQ ID. | | |
| | CcaCas13 | | | ID. NO: | NO: 2975) | | |
| | b 13 | | | 2974) | | | |
| 2b | APML | CcaCas13b | caatggctttcccctgggtgatgca | caatggcttt | GTTGGAACTGCT | APML | 2b |
| | short | | agagcGTTGGAACTGCTCTCATTTT | cccctgggt | CTCATTTTGGAGG | short | |
| | valida- | | GGAGGGTAATCACAAC | gatgcaaga | GTAATCACAAC | | |
| | tion | | (SEQ ID. NO: 2976) | gc (SEQ | (SEQ ID. | | |
| | CcaCas13 | | | ID. NO: | NO: 2978) | | |
| | b 14 | | | 2977) | | | |
| 2b | APML | CcaCas13b | tcaatggctttcccctgggtgatgc | tcaatggcttt | GTTGGAACTGCT | APML | 2b |
| | short | | aagagGTTGGAACTGCTCTCATTTT | cccctgggt | CTCATTTTGGAGG | short | |
| | valida- | | GGAGGGTAATCACAAC | gatgcaaga | GTAATCACAAC | | |
| | tion | | (SEQ ID. NO: 2979) | g (SEQ | (SEQ ID. | | |
| | CcaCas13 | | | ID. NO: | NO: 2981) | | |
| | b 15 | | | 2980) | | | |
| 2b | APML | CcaCas13b | ctcaatggctttcccctgggtgatg | ctcaatggct | GTTGGAACTGCT | APML | 2b |
| | short | | caagaGTTGGAACTGCTCTCATTTT | ttcccctggg | CTCATTTTGGAGG | short | |
| | valida- | | GGAGGGTAATCACAAC | tgatgcaag | GTAATCACAAC | | |
| | tion | | (SEQ ID. NO: 2982) | a (SEQ | (SEQ ID. | | |
| | CcaCas13 | | | ID. NO: | NO: 2984) | | |
| | b 16 | | | 2983) | | | |
| 2b | APML | CcaCas13b | tctcaatggctttcccctgggtgat | tctcaatggc | GTTGGAACTGCT | APML | 2b |
| | short | | gcaagGTTGGAACTGCTCTCATTTT | tttcccctgg | CTCATTTTGGAGG | short | |
| | valida- | | GGAGGGTAATCACAAC | gtgatgcaa | GTAATCACAAC | | |
| | tion | | (SEQ ID. NO: 2985) | g (SEQ | (SEQ ID. | | |
| | CcaCas13 | | | ID. NO: | NO: 2987) | | |
| | b 17 | | | 2986) | | | |
| 2b | APML | CcaCas13b | gtctcaatggctttcccctgggtga | gtctcaatgg | GTTGGAACTGCT | APML | 2b |
| | short | | tgcaaGTTGGAACTGCTCTCATTTT | ctttcccctg | CTCATTTTGGAGG | short | |
| | valida- | | GGAGGGTAATCACAAC | ggtgatgca | GTAATCACAAC | | |
| | tion | | (SEQ ID. NO: 2988) | a (SEQ | (SEQ ID. | | |
| | CcaCas13 | | | ID. NO: | NO: 2990) | | |
| | b 18 | | | 2989) | | | |
| 2b | APML | CcaCas13b | ggtctcaatggctttcccctgggtg | ggtctcaatg | GTTGGAACTGCT | APML | 2b |
| | short | | atgcaGTTGGAACTGCTCTCATTTT | gctttcccct | CTCATTTTGGAGG | short | |
| | valida- | | GGAGGGTAATCACAAC | gggtgatgc | GTAATCACAAC | | |
| | tion | | (SEQ ID. NO: 2991) | a (SEQ | (SEQ ID. | | |
| | CcaCas13 | | | ID. NO: | NO: 2993) | | |
| | b 19 | | | 2992) | | | |
| 2b | APML | CcaCas13b | gggtctcaatggctttcccctgggt | gggtctcaat | GTTGGAACTGCT | APML | 2b |
| | short | | gatgcGTTGGAACTGCTCTCATTTT | ggctttcccc | CTCATTTTGGAGG | short | |
| | valida- | | GGAGGGTAATCACAAC | tgggtgatgc | GTAATCACAAC | | |
| | tion | | (SEQ ID. NO: 2994) | (SEQ ID. | (SEQ ID. | | |
| | CcaCas13 | | | NO: | NO: 2996) | | |
| | b 20 | | | 2995) | | | |
| 2b | APML | CcaCas13b | tgggtctcaatggctttcccctggg | tgggtctcaa | GTTGGAACTGCT | APML | 2b |
| | short | | tgatgGTTGGAACTGCTCTCATTTT | tggctttccc | CTCATTTTGGAGG | short | |
| | valida- | | GGAGGGTAATCACAAC | ctgggtgatg | GTAATCACAAC | | |
| | tion | | (SEQ ID. NO: 2997) | (SEQ ID. | (SEQ ID. | | |
| | CcaCas13 | | | NO: | NO: 2999) | | |
| | b 21 | | | 2998) | | | |
| 2b | APML | CcaCas13b | ctgggtctcaatggctttcccctgg | ctgggtctca | GTTGGAACTGCT | APML | 2b |
| | short | | gtgatGTTGGAACTGCTCTCATTTT | atggctttcc | CTCATTTTGGAGG | short | |
| | valida- | | GGAGGGTAATCACAAC | cctgggtgat | GTAATCACAAC | | |
| | tion | | (SEQ ID. NO: 3000) | (SEQ ID. | (SEQ ID. | | |
| | CcaCas13 | | | NO: | NO: 3002) | | |
| | b 22 | | | 3001) | | | |
| 2b | Thermo- | CcaCas13b | tcattggttgacctttgtacattaa | tcattggttga | GTTGGAACTGCT | Ther- | 2b |
| | nuclease | | tttaaGTTGGAACTGCTCTCATTTT | cctttgtacat | CTCATTTTGGAGG | mo- | |
| | valida- | | GGAGGGTAATCACAAC | taatttaa | GTAATCACAAC | nu- | |
| | tion | | (SEQ ID. NO: 3003) | (SEQ ID. | (SEQ ID. | clease | |
| | CcaCas13 | | | NO: | NO: 3005) | | |
| | b 1 | | | 3004) | | | |
| 2b | Thermo- | CcaCas13b | tgtcattggttgacctttgtacatt | tgtcattggtt | GTTGGAACTGCT | Ther- | 2b |
| | nuclease | | aatttGTTGGAACTGCTCTCATTTT | gacctttgta | CTCATTTTGGAGG | mo- | |
| | valida- | | GGAGGGTAATCACAAC | cattaattt | GTAATCACAAC | nu- | |
| | tion | | (SEQ ID. NO: 3006) | (SEQ ID. | (SEQ ID. | clease | |
| | CcaCas13 | | | NO: | NO: 3008) | | |
| | b 2 | | | 3007) | | | |
| 2b | Thermo- | CcaCas13b | aatgtcattggttgacctttgtaca | aatgtcattg | GTTGGAACTGCT | Ther- | 2b |
| | nuclease | | ttaatGTTGGAACTGCTCTCATTTT | gttgacctttg | CTCATTTTGGAGG | mo- | |
| | valida- | | GGAGGGTAATCACAAC | tacattaat | GTAATCACAAC | nu- | |
| | tion | | (SEQ ID. NO: 3009) | (SEQ ID. | (SEQ ID. | clease | |
| | CcaCas13 | | | NO: | NO: 3011) | | |
| | b 3 | | | 3010) | | | |
| 2b | Thermo- | CcaCas13b | tgaatgtcattggttgacctttgta | tgaatgtcatt | GTTGGAACTGCT | Ther- | 2b |
| | nuclease | | cattaGTTGGAACTGCTCTCATTTT | ggttgaccttt | CTCATTTTGGAGG | mo- | |
| | valida- | | GGAGGGTAATCACAAC | gtacatta | GTAATCACAAC | nu- | |
| | tion | | (SEQ ID. NO: 3012) | (SEQ ID. | (SEQ ID. | clease | |
| | CcaCas13 | | | NO: | NO: 3014) | | |
| | b 4 | | | 3013) | | | |
| 2b | Thermo- | CcaCas13b | tctgaatgtcattggttgacctttg | tctgaatgtc | GTTGGAACTGCT | Ther- | 2b |
| | nuclease | | tacatGTTGGAACTGCTCTCATTTT | attggttgac | CTCATTTTGGAGG | mo- | |
| | valida- | | GGAGGGTAATCACAAC | ctttgtacat | GTAATCACAAC | nu- | |
| | tion | | (SEQ ID. NO: 3015) | (SEQ ID. | (SEQ ID. | clease | |
| | CcaCas13 | | | NO: | NO: 3017) | | |
| | b 5 | | | 3016) | | | |
| 2b | Thermo- | CcaCas13b | agtctgaatgtcattggttgacctt | agtctgaatg | GTTGGAACTGCT | Ther- | 2b |
| | nuclease | | tgtacGTTGGAACTGCTCTCATTTT | tcattggttga | CTCATTTTGGAGG | mo- | |
| | valida- | | GGAGGGTAATCACAAC | cctttgtac | GTAATCACAAC | nu- | |
| | tion | | (SEQ ID. NO: 3018) | (SEQ ID. | (SEQ ID. | clease | |
| | CcaCas13 | | | NO: | NO: 3020) | | |
| | b 6 | | | 3019) | | | |
| 2b | Thermo- | CcaCas13b | atagtctgaatgtcattggttgacc | atagtctgaa | GTTGGAACTGCT | Ther- | 2b |
| | nuclease | | tttgtGTTGGAACTGCTCTCATTTT | tgtcattggtt | CTCATTTTGGAGG | mo- | |
| | valida- | | GGAGGGTAATCACAAC | gacctttgt | GTAATCACAAC | nu- | |
| | tion | | (SEQ ID. NO: 3021) | (SEQ ID. | (SEQ ID. | clease | |
| | CcaCas13 | | | NO: | NO: 3023) | | |
| | b 7 | | | 3022) | | | |
| 2b | Thermo- | CcaCas13b | taatagtctgaatgtcattggttga | taatagtctg | GTTGGAACTGCT | Ther- | 2b |
| | nuclease | | cctttGTTGGAACTGCTCTCATTTT | aatgtcattg | CTCATTTTGGAGG | mo- | |
| | valida- | | GGAGGGTAATCACAAC | gttgaccttt | GTAATCACAAC | nu- | |
| | tion | | (SEQ ID. NO: 3024) | (SEQ ID. | (SEQ ID. | clease | |
| | CcaCasl3 | | | NO: | NO: 3026) | | |
| | b 8 | | | 3025) | | | |
| 2b | Thermo- | CcaCas13b | aataatagtctgaatgtcattggtt | aataatagtc | GTTGGAACTGCT | Ther- | 2b |
| | nuclease | | gacctGTTGGAACTGCTCTCATTTT | tgaatgtcatt | CTCATTTTGGAGG | mo- | |
| | valida- | | GGAGGGTAATCACAAC | ggttgacct | GTAATCACAAC | nu- | |
| | tion | | (SEQ ID. NO: 3027) | (SEQ ID. | (SEQ ID. | clease | |
| | CcaCas13 | | | NO: | NO: 3029) | | |
| | b 9 | | | 3028) | | | |
| 2b | Thermo- | CcaCas13b | ccaataatagtctgaatgtcattgg | ccaataatag | GTTGGAACTGCT | Ther- | 2b |
| | nuclease | | ttgacGTTGGAACTGCTCTCATTTT | tctgaatgtc | CTCATTTTGGAGG | mo- | |
| | valida- | | GGAGGGTAATCACAAC | attggttgac | GTAATCACAAC | nu- | |
| | tion | | (SEQ ID. NO: 3030) | (SEQ ID. | (SEQ ID. | clease | |
| | CcaCas13 | | | NO: | NO: 3032) | | |
| | b 10 | | | 3031) | | | |
| 2b | Thermo- | CcaCas13b | aaccaataatagtctgaatgtcatt | aaccaataat | GTTGGAACTGCT | Ther- | 2b |
| | nuclease | | ggttgGTTGGAACTGCTCTCATTTT | agtctgaatg | CTCATTTTGGAGG | mo- | |
| | valida- | | GGAGGGTAATCACAAC | tcattggttg | GTAATCACAAC | nu- | |
| | tion | | (SEQ ID. NO: 3033) | (SEQ ID. | (SEQ ID. | clease | |
| | CcaCas13 | | | NO: | NO: 3035) | | |
| | b 11 | | | 3034) | | | |
| 2b | Thermo- | CcaCas13b | tcaaccaataatagtctgaatgtca | tcaaccaata | GTTGGAACTGCT | Ther- | 2b |
| | nuclease | | ttggtGTTGGAACTGCTCTCATTTT | atagtctgaa | CTCATTTTGGAGG | mo- | |
| | valida- | | GGAGGGTAATCACAAC | tgtcattggt | GTAATCACAAC | nu- | |
| | tion | | (SEQ ID. NO: 3036) | (SEQ ID. | (SEQ ID. | clease | |
| | CcaCas13 | | | NO: | NO: 3038) | | |
| | b 12 | | | 3037) | | | |
| 2b | Thermo- | CcaCas13b | tatcaaccaataatagtctgaatgt | tatcaaccaa | GTTGGAACTGCT | Ther- | 2b |
| | nuclease | | cattgGTTGGAACTGCTCTCATTTT | taatagtctg | CTCATTTTGGAGG | mo- | |
| | valida- | | GGAGGGTAATCACAAC | aatgtcattg | GTAATCACAAC | nu- | |
| | tion | | (SEQ ID. NO: 3039) | (SEQ ID. | (SEQ ID. | clease | |
| | CcaCas13 | | | NO: | NO: 3041) | | |
| | b 13 | | | 3040) | | | |
| 2b | Thermo- | CcaCas13b | tgtatcaaccaataatagtctgaat | tgtatcaacc | GTTGGAACTGCT | Ther- | 2b |
| | nuclease | | gtcatGTTGGAACTGCTCTCATTTT | aataatagtc | CTCATTTTGGAGG | mo- | |
| | valida- | | GGAGGGTAATCACAAC | tgaatgtcat | GTAATCACAAC | nu- | |
| | tion | | (SEQ ID. NO: 3042) | (SEQ ID. | (SEQ ID. | clease | |
| | CcaCas13 | | | NO: | NO: 3044) | | |
| | b 14 | | | 3043) | | | |
| 2b | Thermo- | CcaCas13b | ggtgtatcaaccaataatagtctga | ggtgtatcaa | GTTGGAACTGCT | Ther- | 2b |
| | nuclease | | atgtcGTTGGAACTGCTCTCATTTT | ccaataatag | CTCATTTTGGAGG | mo- | |
| | valida- | | GGAGGGTAATCACAAC | tctgaatgtc | GTAATCACAAC | nu- | |
| | tion | | (SEQ ID. NO: 3045) | (SEQ ID. | (SEQ ID. | clease | |
| | CcaCas13 | | | NO: | NO: 3047) | | |
| | b 15 | | | 3046) | | | |
| 2b | Thermo- | CcaCas13b | caggtgtatcaaccaataatagtct | caggtgtatc | GTTGGAACTGCT | Ther- | 2b |
| | nuclease | | gaatgGTTGGAACTGCTCTCATTTT | aaccaataat | CTCATTTTGGAGG | mo- | |
| | valida- | | GGAGGGTAATCACAAC | agtctgaatg | GTAATCACAAC | nu- | |
| | tion | | (SEQ ID. NO: 3048) | (SEQ ID. | (SEQ ID. | clease | |
| | CcaCas13 | | | NO: | NO: 3050) | | |
| | b 16 | | | 3049) | | | |
| 2b | Thermo- | CcaCas13b | ttcaggtgtatcaaccaataatagt | ttcaggtgtat | GTTGGAACTGCT | Ther- | 2b |
| | nuclease | | ctgaaGTTGGAACTGCTCTCATTTT | caaccaata | CTCATTTTGGAGG | mo- | |
| | valida- | | GGAGGGTAATCACAAC | atagtctgaa | GTAATCACAAC | nu- | |
| | tion | | (SEQ ID. NO: 3051) | (SEQ ID. | (SEQ ID. | clease | |
| | CcaCas13 | | | NO: | NO: 3053) | | |
| | b 17 | | | 3052) | | | |
| 2b | Thermo- | CcaCas13b | gtttcaggtgtatcaaccaataata | gtttcaggtg | GTTGGAACTGCT | Ther- | 2b |
| | nuclease | | gtctgGTTGGAACTGCTCTCATTTT | tatcaaccaa | CTCATTTTGGAGG | mo- | |
| | valida- | | GGAGGGTAATCACAAC | taatagtctg | GTAATCACAAC | nu- | |
| | tion | | (SEQ ID. NO: 3054) | (SEQ ID. | (SEQ ID. | clease | |
| | CcaCas13 | | | NO: | NO: 3056) | | |
| | b 18 | | | 3055) | | | |
| 2b | Thermo- | CcaCas13b | ttgtttcaggtgtatcaaccaataa | ttgtttcaggt | GTTGGAACTGCT | Ther- | 2b |
| | nuclease | | tagtcGTTGGAACTGCTCTCATTTT | gtatcaacca | CTCATTTTGGAGG | mo- | |
| | valida- | | GGAGGGTAATCACAAC | ataatagtc | GTAATCACAAC | nu- | |
| | tion | | (SEQ ID. NO: 3057) | (SEQ ID. | (SEQ ID. | clease | |
| | CcaCas13 | | | NO: | NO: 3059) | | |
| | b 19 | | | 3058) | | | |
| 2b | Thermo- | CcaCas13b | ctttgtttcaggtgtatcaaccaat | ctttgtttcag | GTTGGAACTGCT | Ther- | 2b |
| | nuclease | | aatagGTTGGAACTGCTCTCATTTT | gtgtatcaac | CTCATTTTGGAGG | mo- | |
| | valida- | | GGAGGGTAATCACAAC | caataatag | GTAATCACAAC | nu- | |
| | tion | | (SEQ ID. NO: 3060) | (SEQ ID. | (SEQ ID. | clease | |
| | CcaCas13 | | | NO: | NO: 3062) | | |
| | b 20 | | | 3061) | | | |
| 2b | Thermo- | CcaCas13b | tgctttgtttcaggtgtatcaacca | tgctttgtttc | GTTGGAACTGCT | Ther- | 2b |
| | nuclease | | ataatGTTGGAACTGCTCTCATTTT | aggtgtatca | CTCATTTTGGAGG | mo- | |
| | valida- | | GGAGGGTAATCACAAC | accaataat | GTAATCACAAC | nu- | |
| | tion | | (SEQ ID. NO: 3063) | (SEQ ID. | (SEQ ID. | clease | |
| | CcaCas13 | | | NO: | NO: 3065) | | |
| | b 21 | | | 3064) | | | |
| 2b | Thermo- | CcaCas13b | gatgctttgtttcaggtgtatcaac | gatgctttgtt | GTTGGAACTGCT | Ther- | 2b |
| | nuclease | | caataGTTGGAACTGCTCTCATTTT | tcaggtgtat | CTCATTTTGGAGG | mo- | |
| | valida- | | GGAGGGTAATCACAAC | caaccaata | GTAATCACAAC | nu- | |
| | tion | | (SEQ ID. NO: 3066) | (SEQ ID. | (SEQ ID. | clease | |
| | CcaCas13 | | | NO: | NO: 3068) | | |
| | b 22 | | | 3067) | | | |
| 2b | Thermo- | CcaCas13b | aggatgctttgtttcaggtgtatca | aggatgcttt | GTTGGAACTGCT | Ther- | 2b |
| | nuclease | | accaaGTTGGAACTGCTCTCATTTT | gtttcaggtg | CTCATTTTGGAGG | mo- | |
| | valida- | | GGAGGGTAATCACAAC | tatcaaccaa | GTAATCACAAC | nu- | |
| | tion | | (SEQ ID. NO: 3069) | (SEQ ID. | (SEQ ID. | clease | |
| | CcaCas13 | | | NO: | NO: 3071) | | |
| | b 23 | | | 3070) | | | |
| 2b | Thermo- | CcaCas13b | ttaggatgctttgtttcaggtgtat | ttaggatgctt | GTTGGAACTGCT | Ther- | 2b |
| | nuclease | | caaccGTTGGAACTGCTCTCATTTT | tgtttcaggt | CTCATTTTGGAGG | mo- | |
| | valida- | | GGAGGGTAATCACAAC | gtatcaacc | GTAATCACAAC | nu- | |
| | tion | | (SEQ ID. NO: 3072) | (SEQ ID. | (SEQ ID. | clease | |
| | CcaCas13 | | | NO: | NO: 3074) | | |
| | b 24 | | | 3073) | | | |
| 2b | Thermo- | CcaCas13b | ttttaggatgctttgtttcaggtgt | ttttaggatgc | GTTGGAACTGCT | Ther- | 2b |
| | nuclease | | atcaaGTTGGAACTGCTCTCATTTT | tttgtttcagg | CTCATTTTGGAGG | mo- | |
| | valida- | | GGAGGGTAATCACAAC | tgtatcaa | GTAATCACAAC | nu- | |
| | tion | | (SEQ ID. NO: 3075) | (SEQ ID. | (SEQ ID. | clease | |
| | CcaCas13 | | | NO: | NO: 3077) | | |
| | b 25 | | | 3076) | | | |
| 2b | Thermo- | CcaCas13b | ttttttaggatgctttgtttcaggt | ttttttaggat | GTTGGAACTGCT | Ther- | 2b |
| | nuclease | | gtatcGTTGGAACTGCTCTCATTTT | gctttgtttca | CTCATTTTGGAGG | mo- | |
| | valida- | | GGAGGGTAATCACAAC | ggtgtatc | GTAATCACAAC | nu- | |
| | tion | | (SEQ ID. NO: 3078) | (SEQ ID. | (SEQ ID. | clease | |
| | CcaCas13 | | | NO: | NO: 3080) | | |
| | b 26 | | | 3079) | | | |
| 2b | Thermo- | CcaCas13b | ccttttttaggatgctttgtttcag | ccttttttagg | GTTGGAACTGCT | Ther- | 2b |
| | nuclease | | gtgtaGTTGGAACTGCTCTCATTTT | atgctttgttt | CTCATTTTGGAGG | mo- | |
| | valida- | | GGAGGGTAATCACAAC | caggtgta | GTAATCACAAC | nu- | |
| | tion | | (SEQ ID. NO: 3081) | (SEQ ID. | (SEQ ID. | clease | |
| | CcaCas13 | | | NO: | NO: 3083) | | |
| | b 27 | | | 3082) | | | |
| 2b | Thermo- | CcaCas13b | caccttttttaggatgctttgtttc | cacctttttta | GTTGGAACTGCT | Ther- | 2b |
| | nuclease | | aggtgGTTGGAACTGCTCTCATTTT | ggatgctttg | CTCATTTTGGAGG | mo- | |
| | valida- | | GGAGGGTAATCACAAC | tttcaggtg | GTAATCACAAC | nu- | |
| | tion | | (SEQ ID. NO: 3084) | (SEQ ID. | (SEQ ID. | clease | |
| | CcaCas13 | | | NO: | NO: 3086) | | |
| | b 28 | | | 3085) | | | |
| 2b | Thermo- | CcaCas13b | tacaccttttttaggatgctttgtt | tacaccttttt | GTTGGAACTGCT | Ther- | 2b |
| | nuclease | | tcaggGTTGGAACTGCTCTCATTTT | taggatgcttt | CTCATTTTGGAGG | mo- | |
| | valida- | | GGAGGGTAATCACAAC | gtticagg | GTAATCACAAC | nu- | |
| | tion | | (SEQ ID. NO: 3087) | (SEQ ID. | (SEQ ID. | clease | |
| | CcaCas13 | | | NO: | NO: 3089) | | |
| | b 29 | | | 3088) | | | |
| 2b | Thermo- | CcaCas13b | tctacaccttttttaggatgctttg | tctacaccttt | GTTGGAACTGCT | Ther- | 2b |
| | nuclease | | tttcaGTTGGAACTGCTCTCATTTT | tttaggatgct | CTCATTTTGGAGG | mo- | |
| | valida- | | GGAGGGTAATCACAAC | ttgtttca | GTAATCACAAC | nu- | |
| | tion | | (SEQ ID. NO: 3090) | (SEQ ID. | (SEQ ID. | clease | |
| | CcaCas13 | | | NO: | NO: 3092) | | |
| | b 30 | | | 3091) | | | |
| 2b | Thermo- | CcaCas13b | tctctacaccttttttaggatgctt | tctctacacct | GTTGGAACTGCT | Ther- | 2b |
| | nuclease | | tgtttGTTGGAACTGCTCTCATTTT | tttttaggatg | CTCATTTTGGAGG | mo- | |
| | valida- | | GGAGGGTAATCACAAC | ctttgttt | GTAATCACAAC | nu- | |
| | tion | | (SEQ ID. NO: 3093) | (SEQ ID. | (SEQ ID. | clease | |
| | CcaCas13 | | | NO: | NO: 3095) | | |
| | b 31 | | | 3094) | | | |
| 2b | Thermo- | CcaCas13b | tttctctacaccttttttaggatgc | tttctctacac | GTTGGAACTGCT | Ther- | 2b |
| | nuclease | | tttgtGTTGGAACTGCTCTCATTTT | cttttttagga | CTCATTTTGGAGG | mo- | |
| | valida- | | GGAGGGTAATCACAAC | tgctttgt | GTAATCACAAC | nu- | |
| | tion | | (SEQ ID. NO: 3096) | (SEQ ID. | (SEQ ID. | clease | |
| | CcaCas13 | | | NO: | NO: 3098) | | |
| | b 32 | | | 3097) | | | |
| 2b | Thermo- | CcaCas13b | tatttctctacaccttttttaggat | tatttctctac | GTTGGAACTGCT | Ther- | 2b |
| | nuclease | | gctttGTTGGAACTGCTCTCATTTT | accttttttag | CTCATTTTGGAGG | mo- | |
| | valida- | | GGAGGGTAATCACAAC | gatgcttt | GTAATCACAAC | nu- | |
| | tion | | (SEQ ID. NO: 3099) | (SEQ ID. | (SEQ ID. | clease | |
| | CcaCas13 | | | NO: | NO: 3101) | | |
| | b 33 | | | 3100) | | | |
| 2b | Thermo- | CcaCas13b | catatttctctacaccttttttagg | catatttctct | GTTGGAACTGCT | Ther- | 2b |
| | nuclease | | atgctGTTGGAACTGCTCTCATTTT | acacctttttt | CTCATTTTGGAGG | mo- | |
| | valida- | | GGAGGGTAATCACAAC | aggatgct | GTAATCACAAC | nu- | |
| | tion | | (SEQ ID. NO: 3102) | (SEQ ID. | (SEQ ID. | clease | |
| | CcaCas13 | | | NO: | NO: 3104) | | |
| | b 34 | | | 3103) | | | |
| 2b | Thermo- | CcaCas13b | accatatttctctacacctttttta | accatatttct | GTTGGAACTGCT | Ther- | 2b |
| | nuclease | | ggatgGTTGGAACTGCTCTCATTTT | ctacacctttt | CTCATTTTGGAGG | mo- | |
| | valida- | | GGAGGGTAATCACAAC | ttaggatg | GTAATCACAAC | nu- | |
| | tion | | (SEQ ID. NO: 3105) | (SEQ ID. | (SEQ ID. | clease | |
| | CcaCas13 | | | NO: | NO: 3107) | | |
| | b 35 | | | 3106) | | | |
| 2b | Thermo- | CcaCas13b | ggaccatatttctctacaccttttt | ggaccatatt | GTTGGAACTGCT | Ther- | 2b |
| | nuclease | | taggaGTTGGAACTGCTCTCATTTT | tctctacacct | CTCATTTTGGAGG | mo- | |
| | valida- | | GGAGGGTAATCACAAC | tttttagga | GTAATCACAAC | nu- | |
| | tion | | (SEQ ID. NO: 3108) | (SEQ ID. | (SEQ ID. | clease | |
| | CcaCas13 | | | NO: | NO: 3110) | | |
| | b 36 | | | 3109) | | | |
| 2b | Thermo- | CcaCas13b | caggaccatatttctctacaccttt | caggaccat | GTTGGAACTGCT | Ther- | 2b |
| | nuclease | | tttagGTTGGAACTGCTCTCATTTT | atttctctaca | CTCATTTTGGAGG | mo- | |
| | valida- | | GGAGGGTAATCACAAC | ccttttttag | GTAATCACAAC | nu- | |
| | tion | | (SEQ ID. NO: 3111) | (SEQ ID. | (SEQ ID. | clease | |
| | CcaCas13 | | | NO: | NO: 3113) | | |
| | b 37 | | | 3112) | | | |
| 2b | Thermo- | CcaCas13b | ttcaggaccatatttctctacacct | ttcaggacca | GTTGGAACTGCT | Ther- | 2b |
| | nuclease | | tttttGTTGGAACTGCTCTCATTTT | tatttctctac | CTCATTTTGGAGG | mo- | |
| | valida- | | GGAGGGTAATCACAAC | acctttttt | GTAATCACAAC | nu- | |
| | tion | | (SEQ ID. NO: 3114) | (SEQ ID. | (SEQ ID. | clease | |
| | CcaCas13 | | | NO: | NO: 3116) | | |
| | b 38 | | | 3115) | | | |
| 2b | Thermo- | CcaCas13b | gcttcaggaccatatttctctacac | gcttcagga | GTTGGAACTGCT | Ther- | 2b |
| | nuclease | | cttttGTTGGAACTGCTCTCATTTT | ccatatttctc | CTCATTTTGGAGG | mo- | |
| | valida- | | GGAGGGTAATCACAAC | tacacctttt | GTAATCACAAC | nu- | |
| | tion | | (SEQ ID. NO: 3117) | (SEQ ID. | (SEQ ID. | clease | |
| | CcaCas13 | | | NO: | NO: 3119) | | |
| | b 39 | | | 3118) | | | |
| 2b | Thermo- | CcaCas13b | ttgcttcaggaccatatttctctac | ttgcttcagg | GTTGGAACTGCT | Ther- | 2b |
| | nuclease | | accttGTTGGAACTGCTCTCATTTT | accatatttct | CTCATTTTGGAGG | mo- | |
| | valida- | | GGAGGGTAATCACAAC | ctacacctt | GTAATCACAAC | nu- | |
| | tion | | (SEQ ID. NO: 3120) | (SEQ ID. | (SEQ ID. | clease | |
| | CcaCas13 | | | NO: | NO: 3122) | | |
| | b 40 | | | 3121) | | | |
| 2b | Thermo- | CcaCas13b | acttgcttcaggaccatatttctct | acttgcttca | GTTGGAACTGCT | Ther- | 2b |
| | nuclease | | acaccGTTGGAACTGCTCTCATTTT | ggaccatatt | CTCATTTTGGAGG | mo- | |
| | valida- | | GGAGGGTAATCACAAC | tctctacacc | GTAATCACAAC | nu- | |
| | tion | | (SEQ ID. NO: 3123) | (SEQ ID. | (SEQ ID. | clease | |
| | CcaCas13 | | | NO: | NO: 3125) | | |
| | b 41 | | | 3124) | | | |
| 2b | Thermo- | CcaCas13b | gcacttgcttcaggaccatatttct | gcacttgctt | GTTGGAACTGCT | Ther- | 2b |
| | nuclease | | ctacaGTTGGAACTGCTCTCATTTT | caggaccat | CTCATTTTGGAGG | mo- | |
| | valida- | | GGAGGGTAATCACAAC | atttctctaca | GTAATCACAAC | nu- | |
| | tion | | (SEQ ID. NO: 3126) | (SEQ ID. | (SEQ ID. | clease | |
| | CcaCas13 | | | NO: | NO: 3128) | | |
| | b 42 | | | 3127) | | | |
| 2b | Thermo- | CcaCas13b | atgcacttgcttcaggaccatattt | atgcacttgc | GTTGGAACTGCT | Ther- | 2b |
| | nuclease | | ctctaGTTGGAACTGCTCTCATTTT | ticaggacca | CTCATTTTGGAGG | mo- | |
| | valida- | | GGAGGGTAATCACAAC | tatttctcta | GTAATCACAAC | nu- | |
| | tion | | (SEQ ID. NO: 3129) | (SEQ ID. | (SEQ ID. | clease | |
| | CcaCas13 | | | NO: | NO: 3131) | | |
| | b 43 | | | 3130) | | | |
| 2b | Thermo- | CcaCas13b | aaatgcacttgcttcaggaccatat | aaatgcactt | GTTGGAACTGCT | Ther- | 2b |
| | nuclease | | ttctcGTTGGAACTGCTCTCATTTT | gcttcagga | CTCATTTTGGAGG | mo- | |
| | valida- | | GGAGGGTAATCACAAC | ccatatttctc | GTAATCACAAC | nu- | |
| | tion | | (SEQ ID. NO: 3132) | (SEQ ID. | (SEQ ID. | clease | |
| | CcaCas13 | | | NO: | NO: 3134) | | |
| | b 44 | | | 3133) | | | |
| 2b | Thermo- | CcaCas13b | gtaaatgcacttgcttcaggaccat | gtaaatgcac | GTTGGAACTGCT | Ther- | 2b |
| | nuclease | | atttcGTTGGAACTGCTCTCATTTT | ttgcttcagg | CTCATTTTGGAGG | mo- | |
| | valida- | | GGAGGGTAATCACAAC | accatatttc | GTAATCACAAC | nu- | |
| | tion | | (SEQ ID. NO: 3135) | (SEQ ID. | (SEQ ID. | clease | |
| | CcaCas13 | | | NO: | NO: 3137) | | |
| | b 45 | | | 3136) | | | |
| 2b | Thermo- | CcaCas13b | tcaattttctttgcattttctacca | tcaattttctt | GTTGGAACTGCT | Ther- | 2b |
| | nuclease | | tctttGTTGGAACTGCTCTCATTTT | tgcattttcta | CTCATTTTGGAGG | mo- | |
| | valida- | | GGAGGGTAATCACAAC | ccatcttt | GTAATCACAAC | nu- | |
| | tion | | (SEQ ID. NO: 3138) | (SEQ ID. | (SEQ ID. | clease | |
| | CcaCas13 | | | NO: | NO: 3140) | | |
| | b 46 | | | 3139) | | | |
| 2b | Thermo- | CcaCas13b | ttcaattttctttgcattttctacc | ttcaattttct | GTTGGAACTGCT | Ther- | 2b |
| | nuclease | | atcttGTTGGAACTGCTCTCATTTT | ttgcattttct | CTCATTTTGGAGG | mo- | |
| | valida- | | GGAGGGTAATCACAAC | accatctt | GTAATCACAAC | nu- | |
| | tion | | (SEQ ID. NO: 3141) | (SEQ ID. | (SEQ ID. | clease | |
| | CcaCas13 | | | NO: | NO: 3143) | | |
| | b 47 | | | 3142) | | | |
| 2b | Thermo- | CcaCas13b | cttcaattttctttgcattttctac | cttcaattttc | GTTGGAACTGCT | Ther- | 2b |
| | nuclease | | catctGTTGGAACTGCTCTCATTTT | tttgcattttc | CTCATTTTGGAGG | mo- | |
| | valida- | | GGAGGGTAATCACAAC | taccatct | GTAATCACAAC | nu- | |
| | tion | | (SEQ ID. NO: 3144) | (SEQ ID. | (SEQ ID. | clease | |
| | CcaCas13 | | | NO: | NO: 3146) | | |
| | b 48 | | | 3145) | | | |
| 2c | thermo- | LwaCas13a | GATTTAGACTACCCCAAAA | TATCAA | GATTTAGACTAC | ther- | 2a |
| | nuclease | | ACGAAGGGGACTAAAACT | CCAATA | CCCAAAAACGAA | mo- | |
| | valida- | | ATCAACCAATAATAGTCTG | ATAGTC | GGGGACTAAAAC | nu- | |
| | tion | | AATGTCAT | TGAATG | (SEQ ID. | clease | |
| | LwaCas13 | | (SEQ ID. NO: 3147) | TCAT | NO: 3149) | | |
| | a 1 (top | | | (SEQ ID. | | | |
| | pre- | | | NO: | | | |
| | dicted) | | | 3148) | | | |
| 2c | thermo- | LwaCas13a | GATTTAGACTACCCCAAAA | TTGCTT | GATTTAGACTAC | ther- | 2a |
| | nuclease | | ACGAAGGGGACTAAAACTT | CAGGA | CCCAAAAACGAA | mo- | |
| | valida- | | GCTTCAGGACCATATTTCT | CCATAT | GGGGACTAAAAC | nu- | |
| | tion | | CTACACC | TTCTCT | (SEQ ID. | clease | |
| | LwaCas13 | | (SEQ ID. NO: 3150) | ACACC | NO: 3152) | | |
| | a 20 | | | (SEQ ID. | | | |
| | (bottom | | | NO: | | | |
| | pre- | | | 3151) | | | |
| | dicted) | | | | | | |
| 2c | APML | LwaCas13a | GATTTAGACTACCCCAAAA | GCGCCA | GATTTAGACTAC | APML | 2a |
| | long | | ACGAAGGGGACTAAAACG | CTGGCC | CCCAAAAACGAA | long | |
| | valida- | | CGCCACTGGCCACGTGGTT | ACGTGG | GGGGACTAAAAC | | |
| | tion | | GCTGTTGG | TTGCTG | (SEQ ID. | | |
| | LwaCas13 | | (SEQ ID. NO: 3153) | TTGG | NO: 3155) | | |
| | a 1 (top | | | (SEQ ID. | | | |
| | pre- | | | NO: | | | |
| | dicted) | | | 3154) | | | |
| 2c | APML | LwaCas13a | GATTTAGACTACCCCAAAA | TCCCCG | GATTTAGACTAC | APML | 2a |
| | long | | ACGAAGGGGACTAAAACT | GCGCCA | CCCAAAAACGAA | long | |
| | valida- | | CCCCGGCGCCACTGGCCAC | CTGGCC | GGGGACTAAAAC | | |
| | tion | | GTGGTTGC | ACGTGG | (SEQ ID. | | |
| | LwaCas13 | | (SEQ ID. NO: 3156) | TTGC | NO: 3158) | | |
| | a 18 | | | (SEQ ID. | | | |
| | (bottom | | | NO: | | | |
| | pre- | | | 3157) | | | |
| | dicted) | | | | | | |
| 2c | APML | LwaCas13a | GATTTAGACTACCCCAAAA | TCTCAA | GATTTAGACTAC | APML | 2a |
| | short | | ACGAAGGGGACTAAAACT | TGGCTT | CCCAAAAACGAA | short | |
| | valida- | | CTCAATGGCTTTCCCCTGG | TCCCCT | GGGGACTAAAAC | | |
| | tion | | GTGATGCA | GGGTGA | (SEQ ID. | | |
| | LwaCas13 | | (SEQ ID. NO: 3159) | TGCA | NO: 3161) | | |
| | a 1 (top | | | (SEQ ID. | | | |
| | pre- | | | NO: | | | |
| | dicted) | | | 3160) | | | |
| 2c | APML | LwaCas13a | GATTTAGACTACCCCAAAA | TGGGTC | GATTTAGACTAC | APML | 2a |
| | short | | ACGAAGGGGACTAAAACT | TCAATG | CCCAAAAACGAA | short | |
| | valida- | | GGGTCTCAATGGCTTTCCC | GCTTTC | GGGGACTAAAAC | | |
| | tion | | CTGGGTGA | CCCTGG | (SEQ ID. | | |
| | LwaCas13 | | (SEQ ID. NO: 3162) | GTGA | NO: 3164) | | |
| | a 23 | | | (SEQ ID. | | | |
| | (bottom | | | NO: | | | |
| | pre- | | | 3163) | | | |
| | dicted) | | | | | | |
| 2d | Thermo- | CcaCas13b | caggtgtatcaaccaataatagtct | caggtgtatc | GTTGGAACTGCT | Ther- | 2b |
| | nuclease | | gaatgGTTGGAACTGCTCTCATTTT | aaccaataat | CTCATTTTGGAGG | mo- | |
| | valida- | | GGAGGGTAATCACAAC | agtctgaatg | GTAATCACAAC | nu- | |
| | tion | | (SEQ ID. NO: 3165) | (SEQ ID. | (SEQ ID. | clease | |
| | CcaCas13 | | | NO: | NO: 3167) | | |
| | b 16 | | | 3166) | | | |
| | (top | | | | | | |
| | pre- | | | | | | |
| | dicted) | | | | | | |
| 2d | Thermo- | CcaCas13b | cttcaattttctttgcattttctac | cttcaattttc | GTTGGAACTGCT | Ther- | 2b |
| | nuclease | | catctGTTGGAACTGCTCTCATTTT | tttgcattttc | CTCATTTTGGAGG | mo- | |
| | valida- | | GGAGGGTAATCACAAC | taccatct | GTAATCACAAC | nu- | |
| | tion | | (SEQ ID. NO: 3168) | (SEQ ID. | (SEQ ID. | clease | |
| | CcaCas13 | | | NO: | NO: 3170) | | |
| | b 48 | | | 3169) | | | |
| | (bottom | | | | | | |
| | pre- | | | | | | |
| | dicted) | | | | | | |
| 2d | APML | CcaCas13b | atggctgcctccccggcgccactgg | atggctgcct | GTTGGAACTGCT | APML | 2b |
| | long | | ccacgGTTGGAACTGCTCTCATTTT | ccccggcgc | CTCATTTTGGAGG | long | |
| | valida- | | GGAGGGTAATCACAAC | cactggcca | GTAATCACAAC | | |
| | tion | | (SEQ ID. NO: 3171) | cg (SEQ | (SEQ ID. | | |
| | CcaCas13 | | | ID. NO: | NO: 3173) | | |
| | b 14 | | | 3172) | | | |
| | (top | | | | | | |
| | pre- | | | | | | |
| | dicted) | | | | | | |
| 2d | APML | CcaCas13b | tggctgcctccccggcgccactggc | tggctgcctc | GTTGGAACTGCT | APML | 2b |
| | long | | cacgtGTTGGAACTGCTCTCATTTT | cccggcgcc | CTCATTTTGGAGG | long | |
| | valida- | | GGAGGGTAATCACAAC | actggccac | GTAATCACAAC | | |
| | tion | | (SEQ ID. NO: 3174) | gt(SEQ | (SEQ ID. | | |
| | CcaCas13 | | | ID. NO: | NO: 3176) | | |
| | b 13 | | | 3175) | | | |
| | (bottom | | | | | | |
| | pre- | | | | | | |
| | dicted) | | | | | | |
| 2d | APML | CcaCas13b | cccctgggtgatgcaagagctgagg | cccctgggt | GTTGGAACTGCT | APML | 2b |
| | short | | tcctgGTTGGAACTGCTCTCATTTT | gatgcaaga | CTCATTTTGGAGG | short | |
| | valida- | | GGAGGGTAATCACAAC | gctgaggtc | GTAATCACAAC | | |
| | tion | | (SEQ ID. NO: 3177) | ctg (SEQ | (SEQ ID. | | |
| | CcaCas13 | | | ID. NO: | NO: 3179) | | |
| | b 4 (top | | | 3178) | | | |
| | pre- | | | | | | |
| | dicted) | | | | | | |
| 2d | APML | CcaCas13b | ctcaatggctttcccctgggtgatg | ctcaatggct | GTTGGAACTGCT | APML | 2b |
| | short | | caagaGTTGGAACTGCTCTCATTTT | ttcccctggg | CTCATTTTGGAGG | short | |
| | valida- | | GGAGGGTAATCACAAC | tgatgcaag | GTAATCACAAC | | |
| | tion | | (SEQ ID. NO: 3180) | a (SEQ | (SEQ ID. | | |
| | CcaCas13 | | | ID. NO: | NO: 3182) | | |
| | b 16 | | | 3181) | | | |
| | (bottom | | | | | | |
| | pre- | | | | | | |
| | dicted) | | | | | | |
| 2e | thermo- | LwaCas13a | GATTTAGACTACCCCAAAA | TATCAA | GATTTAGACTAC | ther- | 2a |
| | nuclease | | ACGAAGGGGACTAAAACT | CCAATA | CCCAAAAACGAA | mo- | |
| | valida- | | ATCAACCAATAATAGTCTG | ATAGTC | GGGGACTAAAAC | nu- | |
| | tion | | AATGTCAT | TGAATG | (SEQ ID. | clease | |
| | LwaCas13 | | (SEQ ID. NO: 3183) | TCAT | NO: 3185) | | |
| | a 1 (top | | | (SEQ ID. | | | |
| | pre- | | | NO: | | | |
| | dicted) | | | 3184) | | | |
| 2e | thermo- | LwaCas13a | GATTTAGACTACCCCAAAA | TTGCTT | GATTTAGACTAC | ther- | 2a |
| | nuclease | | ACGAAGGGGACTAAAACTT | CAGGA | CCCAAAAACGAA | mo- | |
| | valida- | | GCTTCAGGACCATATTTCT | CCATAT | GGGGACTAAAAC | nu- | |
| | tion | | CTACACC | TTCTCT | (SEQ ID. | clease | |
| | LwaCas13 | | (SEQ ID. NO: 3186) | ACACC | NO: 3188) | | |
| | a 20 | | | (SEQ ID. | | | |
| | (bottom | | | NO: | | | |
| | pre- | | | 3187) | | | |
| | dicted) | | | | | | |
| 2e | APML | LwaCas13a | GATTTAGACTACCCCAAAA | GCGCCA | GATTTAGACTAC | APML | 2a |
| | long | | ACGAAGGGGACTAAAACG | CTGGCC | CCCAAAAACGAA | long | |
| | valida- | | CGCCACTGGCCACGTGGTT | ACGTGG | GGGGACTAAAAC | | |
| | tion | | GCTGTTGG | TTGCTG | (SEQ ID. | | |
| | LwaCas13 | | (SEQ ID. NO: 3189) | TTGG | NO: 3191) | | |
| | a 1 (top | | | (SEQ ID. | | | |
| | pre- | | | NO: | | | |
| | dicted) | | | 3190) | | | |
| 2e | APML | LwaCas13a | GATTTAGACTACCCCAAAA | TCCCCG | GATTTAGACTAC | APML | 2a |
| | long | | ACGAAGGGGACTAAAACT | GCGCCA | CCCAAAAACGAA | long | |
| | valida- | | CCCCGGCGCCACTGGCCAC | CTGGCC | GGGGACTAAAAC | | |
| | tion | | GTGGTTGC | ACGTGG | (SEQ ID. | | |
| | LwaCas13 | | (SEQ ID. NO: 3192) | TTGC | NO: 3194) | | |
| | a 18 | | | (SEQ ID. | | | |
| | (bottom | | | NO: | | | |
| | pre- | | | 3193) | | | |
| | dicted) | | | | | | |
| 2e | APML | LwaCas13a | GATTTAGACTACCCCAAAA | TCTCAA | GATTTAGACTAC | APML | 2a |
| | short | | ACGAAGGGGACTAAAACT | TGGCTT | CCCAAAAACGAA | short | |
| | valida- | | CTCAATGGCTTTCCCCTGG | TCCCCT | GGGGACTAAAAC | | |
| | tion | | GTGATGCA | GGGTGA | (SEQ ID. | | |
| | LwaCas13 | | (SEQ ID. NO: 3195) | TGCA | NO: 3197) | | |
| | a 1 (top | | | (SEQ ID. | | | |
| | pre- | | | NO: | | | |
| | dicted) | | | 3196) | | | |
| 2e | APML | LwaCas13a | GATTTAGACTACCCCAAAA | TGGGTC | GATTTAGACTAC | APML | 2a |
| | short | | ACGAAGGGGACTAAAACT | TCAATG | CCCAAAAACGAA | short | |
| | valida- | | GGGTCTCAATGGCTTTCCC | GCTTTC | GGGGACTAAAAC | | |
| | tion | | CTGGGTGA | CCCTGG | (SEQ ID. | | |
| | LwaCas13 | | (SEQ ID. NO: 3198) | GTGA | NO: 3200) | | |
| | a 23 | | | (SEQ ID. | | | |
| | (bottom | | | NO: | | | |
| | pre- | | | 3199) | | | |
| | dicted) | | | | | | |
| 2f | Thermo- | CcaCas13b | caggtgtatcaaccaataatagtct | caggtgtatc | GTTGGAACTGCT | Ther- | 2b |
| | nuclease | | gaatgGTTGGAACTGCTCTCATTTT | aaccaataat | CTCATTTTGGAGG | mo- | |
| | valida- | | GGAGGGTAATCACAAC | agtctgaatg | GTAATCACAAC | nu- | |
| | tion | | (SEQ ID. NO: 3201) | (SEQ ID. | (SEQ ID. | clease | |
| | CcaCas13 | | | NO: | NO: 3203) | | |
| | b 16 | | | 3202) | | | |
| | (top | | | | | | |
| | pre- | | | | | | |
| | dicted) | | | | | | |
| 2f | Thermo- | CcaCas13b | cttcaattttctttgcattttctac | cttcaattttc | GTTGGAACTGCT | Ther- | 2b |
| | nuclease | | catctGTTGGAACTGCTCTCATTTT | tttgcattttc | CTCATTTTGGAGG | mo- | |
| | valida- | | GGAGGGTAATCACAAC | taccatct | GTAATCACAAC | nu- | |
| | tion | | (SEQ ID. NO: 3204) | (SEQ ID. | (SEQ ID. | clease | |
| | CcaCas13 | | | NO: | NO: 3206) | | |
| | b 48 | | | 3205) | | | |
| | (bottom | | | | | | |
| | pre- | | | | | | |
| | dicted) | | | | | | |
| 2f | APML | CcaCas13b | atggctgcctccccggcgccactgg | atggctgcct | GTTGGAACTGCT | APML | 2b |
| | long | | ccacgGTTGGAACTGCTCTCATTTT | ccccggcgc | CTCATTTTGGAGG | long | |
| | valida- | | GGAGGGTAATCACAAC | cactggcca | GTAATCACAAC | | |
| | tion | | (SEQ ID. NO: 3207) | cg (SEQ | (SEQ ID. | | |
| | CcaCas13 | | | ID. NO: | NO: 3209) | | |
| | b 14 | | | 3208) | | | |
| | (top | | | | | | |
| | pre- | | | | | | |
| | dicted) | | | | | | |
| 2f | APML | CcaCas13b | tggctgcctccccggcgccactggc | tggctgcctc | GTTGGAACTGCT | APML | 2b |
| | long | | cacgtGTTGGAACTGCTCTCATTTT | cccggcgcc | CTCATTTTGGAGG | long | |
| | valida- | | GGAGGGTAATCACAAC | actggccac | GTAATCACAAC | | |
| | tion | | (SEQ ID. NO: 3210) | gt(SEQ | (SEQ ID. | | |
| | CcaCas13 | | | ID. NO: | NO: 3212) | | |
| | b 13 | | | 3211) | | | |
| | (bottom | | | | | | |
| | pre- | | | | | | |
| | dicted) | | | | | | |
| 2f | APML | CcaCas13b | cccctgggtgatgcaagagctgagg | cccctgggt | GTTGGAACTGCT | APML | 2b |
| | short | | tcctgGTTGGAACTGCTCTCATTTT | gatgcaaga | CTCATTTTGGAGG | short | |
| | valida- | | GGAGGGTAATCACAAC | gctgaggtc | GTAATCACAAC | | |
| | tion | | (SEQ ID. NO: 3213) | ctg (SEQ | (SEQ ID. | | |
| | CcaCas13 | | | ID. NO: | NO: 3215) | | |
| | b 4 (top | | | 3214) | | | |
| | pre- | | | | | | |
| | dicted) | | | | | | |
| 2f | APML | CcaCas13b | ctcaatggctttcccctgggtgatg | ctcaatggct | GTTGGAACTGCT | APML | 2b |
| | short | | caagaGTTGGAACTGCTCTCATTTT | ttcccctggg | CTCATTTTGGAGG | short | |
| | valida- | | GGAGGGTAATCACAAC | tgatgcaag | GTAATCACAAC | | |
| | tion | | (SEQ ID. NO: 3216) | a (SEQ | (SEQ ID. | | |
| | CcaCas13 | | | ID. NO: | NO: 3218) | | |
| | b 16 | | | 3217) | | | |
| | (bottom | | | | | | |
| | pre- | | | | | | |
| | dicted) | | | | | | |
| 3b | Acyl- | LwaCas13a | GATTTAGACTACCCCAAAA | GCACGC | GATTTAGACTAC | Acyl- | 3b |
| | trans- | | ACGAAGGGGACTAAAACgca | TGGAGG | CCCAAAAACGAA | trans- | |
| | ferase | | cgctggaggggtcgagcacgctcac | GGTCGA | GGGGACTAAAAC | ferase | |
| | LwaCas13 | | (SEQ ID. NO: 3219) | GCACGC | (SEQ ID. | | |
| | a top | | | TCAC | NO: 3221) | | |
| | pre- | | | (SEQ ID. | | | |
| | dicted | | | NO: | | | |
| | crRNA | | | 3220) | | | |
| 3c | Acyl- | LwaCas13a | GATTTAGACTACCCCAAAA | CATCGC | GATTTAGACTAC | Acyl- | 3c |
| | trans- | | ACGAAGGGGACTAAAACcat | AGAGC | CCCAAAAACGAA | trans- | |
| | ferase | | cgcagagcacgctggaggggtcgag | ACGCTG | GGGGACTAAAAC | ferase | |
| | LwaCas13 | | (SEQ ID. NO: 3222) | GAGGG | (SEQ ID. | | |
| | a bottom | | | GTCGAG | NO: 3224) | | |
| | pre- | | | (SEQ ID. | | | |
| | dicted | | | NO: | | | |
| | crRNA | | | 3223) | | | |
| 3d-f | Acyl- | LwaCas13a | GATTTAGACTACCCCAAAA | GCACGC | GATTTAGACTAC | Acyl- | 3b |
| | trans- | | ACGAAGGGGACTAAAACgca | TGGAGG | CCCAAAAACGAA | trans- | |
| | ferase | | cgctggaggggtcgagcacgctcac | GGTCGA | GGGGACTAAAAC | ferase | |
| | LwaCas13 | | (SEQ ID. NO: 3225) | GCACGC | (SEQ ID. | | |
| | a top | | | TCAC | NO: 3227) | | |
| | pre- | | | (SEQ ID. | | | |
| | dicted | | | NO: | | | |
| | crRNA | | | 3226) | | | |
| 3d-f | Acyl- | LwaCas13a | GATTTAGACTACCCCAAAA | CATCGC | GATTTAGACTAC | Acyl- | 3c |
| | trans- | | ACGAAGGGGACTAAAACcat | AGAGC | CCCAAAAACGAA | trans- | |
| | ferase | | cgcagagcacgctggaggggtcgag | ACGCTG | GGGGACTAAAAC | ferase | |
| | LwaCas13 | | (SEQ ID. NO: 3228) | GAGGG | (SEQ ID. | | |
| | a bottom | | | GTCGAG | NO: 3230) | | |
| | pre- | | | (SEQ ID. | | | |
| | dicted | | | NO: | | | |
| | crRNA | | | 3229) | | | |
| 3h | Thermo- | CcaCas13b | caggtgtatcaaccaataatagtct | caggtgtatc | GTTGGAACTGCT | Ther- | 2b |
| | nuclease | | gaatgGTTGGAACTGCTCTCATTTT | aaccaataat | CTCATTTTGGAGG | mo- | |
| | valida- | | GGAGGGTAATCACAAC | agtctgaatg | GTAATCACAAC | nu- | |
| | tion | | (SEQ ID. NO: 3231) | (SEQ ID. | (SEQ ID. | clease | |
| | CcaCas13 | | | NO: | NO: 3233) | | |
| | b 16 | | | 3232) | | | |
| | (top | | | | | | |
| | pre- | | | | | | |
| | dicted) | | | | | | |
| 3i | Thermo- | CcaCas13b | cttcaattttctttgcattttctac | cttcaattttc | GTTGGAACTGCT | Ther- | 2b |
| | nuclease | | catctGTTGGAACTGCTCTCATTTT | tttgcattttc | CTCATTTTGGAGG | mo- | |
| | valida- | | GGAGGGTAATCACAAC | taccatct | GTAATCACAAC | nu- | |
| | tion | | (SEQ ID. NO: 3234) | (SEQ ID. | (SEQ ID. | clease | |
| | CcaCas13 | | | NO: | NO: 3236) | | |
| | b 48 | | | 3235) | | | |
| | (bottom | | | | | | |
| | pre- | | | | | | |
| | dicted) | | | | | | |
| 3j-l | Thermo- | CcaCas13b | caggtgtatcaaccaataatagtct | caggtgtatc | GTTGGAACTGCT | Ther- | 2b |
| | nuclease | | gaatgGTTGGAACTGCTCTCATTTT | aaccaataat | CTCATTTTGGAGG | mo- | |
| | valida- | | GGAGGGTAATCACAAC | agtctgaatg | GTAATCACAAC | nu- | |
| | tion | | (SEQ ID. NO: 3237) | (SEQ ID. | (SEQ ID. | clease | |
| | CcaCas13 | | | NO: | NO: 3239) | | |
| | b 16 | | | 3238) | | | |
| | (top | | | | | | |
| | pre- | | | | | | |
| | dicted) | | | | | | |
| 3j-l | Thermo- | CcaCas13b | cttcaattttctttgcattttctac | cttcaattttc | GTTGGAACTGCT | Ther- | 2b |
| | nuclease | | catctGTTGGAACTGCTCTCATTTT | tttgcattttc | CTCATTTTGGAGG | mo- | |
| | valida- | | GGAGGGTAATCACAAC | taccatct | GTAATCACAAC | nu- | |
| | tion | | (SEQ ID. NO: 3240) | (SEQ ID. | (SEQ ID. | clease | |
| | CcaCas13 | | | NO: | NO: 3242) | | |
| | b 48 | | | 3241) | | | |
| | (bottom | | | | | | |
| | pre- | | | | | | |
| | dicted) | | | | | | |
| 4b | Ea175 | LwaCas13a | GATTTAGACTACCCCAAAA | AAGATG | GATTTAGACTAC | Ea175 | 4b |
| | LwaCas13 | | ACGAAGGGGACTAAAACA | TGGATT | CCCAAAAACGAA | | |
| | atop | | AGATGTGGATTTTTACATA | TTTACA | GGGGACTAAAAC | | |
| | pre- | | GTAAAAAT | TAGTAA | (SEQ ID. | | |
| | dicted | | (SEQ ID. NO: 3243) | AAAT | NO: 3245) | | |
| | | | | (SEQ ID. | | | |
| | | | | NO: | | | |
| | | | | 3244) | | | |
| 4b | Thermo- | CcaCas13b | caggtgtatc aaccaataatagtc | caggtgtatc | GTTGGAACTGCT | Ther- | 2b |
| | nuclease | | tgaatgGTTGGAACTGCTCTCATTT | aaccaataat | CTCATTTTGGAGG | mo- | |
| | valida- | | TGGAGGGTAATCACAAC | agtctgaatg | GTAATCACAAC | nu- | |
| | tion | | (SEQ ID. NO: 3246) | (SEQ ID. | (SEQ ID. | clease | |
| | CcaCas13 | | | NO: | NO: 3248) | | |
| | b 16 | | | 3247) | | | |
| | (top | | | | | | |
| | pre- | | | | | | |
| | dicted) | | | | | | |
| 4d-e | Ea175 | LwaCas13a | GATTTAGACTACCCCAAAA | AAGATG | GATTTAGACTAC | Ea175 | 4b |
| | LwaCas13 | | ACGAAGGGGACTAAAACA | TGGATT | CCCAAAAACGAA | | |
| | atop | | AGATGTGGATTTTTACATA | TTTACA | GGGGACTAAAAC | | |
| | pre- | | GTAAAAAT | TAGTAA | (SEQ ID. | | |
| | dicted | | (SEQ ID. NO: 3249) | AAAT | NO: 3251) | | |
| | | | | (SEQ ID. | | | |
| | | | | NO: | | | |
| | | | | 3250) | | | |
| 4d-e | Thermo- | CcaCas13b | caggtgtatc aaccaataatagtc | caggtgtatc | GTTGGAACTGCT | Ther- | 2b |
| | nuclease | | tgaatgGTTGGAACTGCTCTCATTT | aaccaataat | CTCATTTTGGAGG | mo- | |
| | valida- | | TGGAGGGTAATCACAAC | agtctgaatg | GTAATCACAAC | nu- | |
| | tion | | (SEQ ID. NO: 3252) | (SEQ ID. | (SEQ ID. | clease | |
| | CcaCas13 | | | NO: | NO: 3254) | | |
| | b 16 | | | 3253) | | | |
| | (top | | | | | | |
| | pre- | | | | | | |
| | dicted) | | | | | | |
| 8a-c | Ea175 | LwaCas13a | GATTTAGACTACCCCAAAA | AAGATG | GATTTAGACTAC | Ea175 | 4b |
| | LwaCas13 | | ACGAAGGGGACTAAAACA | TGGATT | CCCAAAAACGAA | | |
| | atop | | AGATGTGGATTTTTACATA | TTTACA | GGGGACTAAAAC | | |
| | pre- | | GTAAAAAT | TAGTAA | (SEQ ID. | | |
| | dicted | | (SEQ ID. NO: 3255) | AAAT | NO: 3257) | | |
| | | | | (SEQ ID. | | | |
| | | | | NO: | | | |
| | | | | 3256) | | | |
| 8d-f | Ea81 | LwaCas13a | GATTTAGACTACCCCAAAA | ATTTCT | GATTTAGACTAC | Ea81 | 8d |
| | LwaCas13 | | ACGAAGGGGACTAAAACA | AGAATT | CCCAAAAACGAA | | |
| | atop | | TTTCTAGAATTGAAGGAAT | GAAGG | GGGGACTAAAAC | | |
| | pre- | | TAAACCAA | AATTAA | (SEQ ID. | | |
| | dicted | | (SEQ ID. NO: 3258) | ACCAA | NO: 3260) | | |
| | | | | (SEQ ID. | | | |
| | | | | NO: | | | |
| | | | | 3259) | | | |
| 9d-e | Ea175 | LwaCas13a | GATTTAGACTACCCCAAAA | AAGATG | GATTTAGACTAC | Ea175 | 4b |
| | LwaCas13 | | ACGAAGGGGACTAAAACA | TGGATT | CCCAAAAACGAA | | |
| | atop | | AGATGTGGATTTTTACATA | TTTACA | GGGGACTAAAAC | | |
| | pre- | | GTAAAAAT | TAGTAA | (SEQ ID. | | |
| | dicted | | (SEQ ID. NO: 3261) | AAAT | NO: 3263) | | |
| | | | | (SEQ ID. | | | |
| | | | | NO: | | | |
| | | | | 3262) | | | |
| 10b- | Lectin | LwaCas13a | GATTTAGACTACCCCAAAA | ggggtggag | GATTTAGACTAC | Lectin | 10b |
| c | LwaCas13 | | ACGAAGGGGACTAAAACggg | tagagggcg | CCCAAAAACGAA | | |
| | a crRNA | | gtggagtagagggcgcgaccaagag | cgaccaaga | GGGGACTAAAAC | | |
| | | | (SEQ ID. NO: 3264) | g(SEQ | (SEQ ID. | | |
| | | | | ID. NO: | NO: 3266) | | |
| | | | | 3265) | | | |
| 10b- | ssDN1 | CcaCas13b | acgccaagcttgcatgcctgcaggt | acgccaagc | GTTGGAACTGCT | ssDNA | 10b |
| c | CcaCas13 | | cgagtGTTGGAACTGCTCTCATTTT | ttgcatgcct | CTCATTTTGGAGG | 1 | |
| | b crRNA | | GGAGGGTAATCACAAC | gcaggtcga | GTAATCACAAC | | |
| | | | (SEQ ID. NO: 3267) | gt(SEQ | (SEQ ID. | | |
| | | | | ID. NO: | NO: 3269) | | |
| | | | | 3268) | | | |
| 10e- | Zika | LwaCas13a | GATTTAGACTACCCCAAAA | actccctaga | GATTTAGACTAC | Zika | 10e |
| f | LwaCas13 | | ACGAAGGGGACTAAAACact | accacgaca | CCCAAAAACGAA | | |
| | a crRNA | | ccctagaaccacgacagtttgcctt | gtttgcctt | GGGGACTAAAAC | | |
| | | | (SEQ ID. NO: 3270) | (SEQ ID. | (SEQ ID. | | |
| | | | | NO: | NO: 3272) | | |
| | | | | 3271) | | | |
| 10e- | Dengue | CcaCas13b | tttgcttctgtccagtgagcatggt | tttgcttctgt | GTTGGAACTGCT | Dengue | 10e |
| f | CcaCas13 | | cTttcgGTGGAACTGCTCTCATTTT | ccagtgagc | CTCATTTTGGAGG | | |
| | b crRNA | | GGAGGGTAATCACAAC | atggtcttcg | GTAATCACAAC | | |
| | | | (SEQ ID. NO: 3273) | (SEQ ID. | (SEQ ID. | | |
| | | | | NO: | NO: 3275) | | |
| | | | | 3274) | | | |
| 10e- | ssDNA1 | AsCas12a | TAATTTCTACTCTTGTAGAT | ctgtgtttatc | TAATTTCTACTCT | ssDNA | 10e |
| f | AsCas12a | | ctgtgtttatccgctcacaa | cgctcacaa | TGTAGAT | 1 | |
| | crRNA | | (SEQ ID. NO: 3276) | (SEQ ID. | (SEQ ID. | | |
| | | | | NO: | NO: 3278) | | |
| | | | | 3277) | | | |

TABLE 2
Target sequences used in this study

| | | | DNA/ |
|---|---|---|---|
| FIG. | Name | Target sequence | RNA |
| 1b | Ebola | attcgcagtgaagagttgtctttcacagttgtatcaaacggagccaaaaacatcagtggtcag | RNA |
| | | agtccggcgcgaacttcttccgacccagggaccaacacaacaactgaagaccacaaaatcatg | |
| | | gcttcagaaaattcctctgcaatggttcaagtgcacagtcaa (SEQ ID. NO: 3279) | |
| 1b | Zika | gacaccggaactccacactggaacaacaaagaagcactggtagagttcaaggacgcacatgcc | RNA |
| | | aaaaggcaaactgtcgtggttctagggagtcaagaaggagcagttcacacggcccttgctgga | |
| | | gctctggaggctgagatggatggtgcaaagggaaggctgtcctctggc (SEQ ID. NO: | |
| | | 3280) | |
| 2a-f | Thermo- | agcgattgatggtgatactgttaaattaatgtacaaaggtcaaccaatgacattcagactatt | RNA |
| | nuclease | attggttgatacacctgaaacaaagcatcctaaaaaaggtgtagagaaatatggtcctgaagc | |
| | | aagtgcatttacgaaaaagatggtagaaaatgcaaagaaaattgaag (SEQ ID. NO: | |
| | | 3281) | |
| 2a-f | APML | cacctggatggaccgcctagccccaggagccccgtcataggaagtgaggtcttcctgcccaac | RNA |
| | long | agcaaccacgtggccagtggcgccggggaggcagccattgagacccagagcagcagttctgaa | |
| | | gagatagtgcccagccctccctcgccaccccctctaccccgcatctaca (SEQ ID. NO: | |
| | | 3282) | |
| 2a-f | APML | ggaggagccccagagcctgcaagctgccgtgcgcaccgatggcttcgacgagttcaaggtgcg | RNA |
| | short | cctgcaggacctcagctcttgcatcacccaggggaaagccattgagacccagagcagcagttc | |
| | | tgaagagatagtgcccagccctccctcgccaccccctctaccccgcatc (SEQ ID. NO: | |
| | | 3283) | |
| 3b-f | Acyle- | gtcgggcgcgcacgttttcccttcgctgagcacgctgcgcgcgtcgcctacgtgaatgcgctg | DNA |
| | trans- | ttcgatgcgttggccgaaggcaacccgcgggtgagcgtgctcgacccctccagcgtgctctgc | |
| | ferase | gatggcctggattgtttcgccgaacgtgatggctggtcgctgtacatgg (SEQ ID. NO: | |
| | | 3284) | |
| 3h-l | Thermo- | agcgattgatggtgatactgttaaattaatgtacaaaggtcaaccaatgacattcagactatt | DNA |
| | nuclease | attggttgatacacctgaaacaaagcatcctaaaaaaggtgtagagaaatatggtcctgaagc | |
| | | aagtgcatttacgaaaaagatggtagaaaatgcaaagaaaattgaag (SEQ ID. NO: | |
| | | 3285) | |
| 4b | Thermo- | agcgattgatggtgatactgttaaattaatgtacaaaggtcaaccaatgacattcagactatt | DNA |
| | nuclease | attggttgatacacctgaaacaaagcatcctaaaaaaggtgtagagaaatatggtcctgaagc | |
| | | aagtgcatttacgaaaaagatggtagaaaatgcaaagaaaattgaag (SEQ ID. NO: | |
| | | 3286) | |
| 4b | Ea175 | GGCCAGTTTGAATAAGACAATGAATTATTTTTACTATGTAAAAATCCACATCTTTCACATTTC | DNA |
| | | CATTCTTGTGTTTCA (SEQ ID. NO: 3287) | |
| 4d-e | Thermo- | agcgattgatggtgatactgttaaattaatgtacaaaggtcaaccaatgacattcagactatt | DNA |
| | nuclease | attggttgatacacctgaaacaaagcatcctaaaaaaggtgtagagaaatatggtcctgaagc | |
| | | aagtgcatttacgaaaaagatggtagaaaatgcaaagaaaattgaag (SEQ ID. NO: | |
| | | 3288) | |
| 4d-e | Ea175 | GGCCAGTTTGAATAAGACAATGAATTATTTTTACTATGTAAAAATCCACATCTTTCACATTTC | DNA |
| | | CATTCTTGTGTTTCA (SEQ ID. NO: 3289) | |
| 7a | ssRNA 1 | GGCCAGTGAATTCGAGCTCGGTACCCGGGGATCCTCTAGAAATATGGATTACTTGgtAGAACA | RNA |
| | | GCAATCTACTCGACCTGCAGGCATGCAAGCTTGGCGTAATCATGGTCATAGCTGTTTCCTGTG | |
| | | TTTATCCGCTCACAATTCCACACAACATACGAGCCGGAAGCATAAAG (SEQ ID. NO: | |
| | | 3290) | |
| 7a | Thermo- | agcgattgatggtgatactgttaaattaatgtacaaaggtcaaccaatgacattcagactatt | RNA |
| | nuclease | attggttgatacacctgaaacaaagcatcctaaaaaaggtgtagagaaatatggtcctgaagc | |
| | | aagtgcatttacgaaaaagatggtagaaaatgcaaagaaaattgaag (SEQ ID. NO: | |
| | | 3291) | |
| 7a | Dengue | agtacatattcaggggccaacctctcaacaatgacgaagaccatgctcactggacagaagcaa | RNA |
| | | aaatgctgctggacaacatcaacacaccagaagggattataccagctctctttgaaccagaaa | |
| | | gggagaagtcagccgccatagacggtgaataccgcctgaagggt (SEQ ID. NO: 3292) | |
| 8a-c | Ea175 | GGCCAGTTTGAATAAGACAATGAATTATTTTTACTATGTAAAAATCCACATCTTTCACATTTC | DNA |
| | | CATTCTTGTGTTTCA (SEQ ID. NO: 3293) | |
| 8d-f | Ea81 | ATTGTTACATTGTACACATACATAAGCAACATAAGCATCATTTGGTTTAATTCCTTCAATTCT | DNA |
| | | AGAAATATTTGTTTGATTTTTTACTTCACGCCTACTCAT (SEQ ID. NO: 3294) | |
| 8d-f | Ea175 | GGCCAGTTTGAATAAGACAATGAATTATTTTTACTATGTAAAAATCCACATCTTTCACATTTC | DNA |
| | | CATTCTTGTGTTTCA (SEQ ID. NO: 3295) | |
| 10b-c | Lectin | aagttacaactcaataaggttgacgaaaacggcaccccaaaaccctcgtctcttggtcgcgcc | DNA |
| | | ctctactccacccccatccacatttgggacaaagaaaccggtagcgttgccagcttcgccgct | |
| | | tccttcaacttcaccttctatgcccctgacacaaaaaggcttgcagatgggcttgccttcttt | |
| | | ctcgc (SEQ ID. NO: 3296) | |
| 10b-c | ssDNA 1 | GGCCAGTGAATTCGAGCTCGGTACCCGGGGATCCTCTAGAAATATGGATTACTTGgtAGAACA | DNA |
| | | GCAATCTACTCGACCTGCAGGCATGCAAGCTTGGCGTAATCATGGTCATAGCTGTTTCCTGTG | |
| | | TTTATCCGCTCACAATTCCACACAACATACGAGCCGGAAGCATAAAG (SEQ ID. NO: | |
| | | 3297) | |
| 10e-f | Zika | gacaccggaactccacactggaacaacaaagaagcactggtagagttcaaggacgcacatgcc | RNA |
| | | aaaaggcaaactgtcgtggttctagggagtcaagaaggagcagttcacacggcccttgctgga | |
| | | gctctggaggctgagatggatggtgcaaagggaaggctgtcctctggc (SEQ ID. NO: | |
| | | 3298) | |
| 10e-f | Dengue | agtacatattcaggggccaacctctcaacaatgacgaagaccatgctcactggacagaagcaa | RNA |
| | | aaatgctgctggacaacatcaacacaccagaagggattataccagctctctttgaaccagaaa | |
| | | gggagaagtcagccgccatagacggtgaataccgcctgaagggt (SEQ ID. NO: 3299) | |
| 10e-f | ssDNA 1 | GGCCAGTGAATTCGAGCTCGGTACCCGGGGATCCTCTAGAAATATGGATTACTTGgtAGAACA | DNA |
| | | GCAATCTACTCGACCTGCAGGCATGCAAGCTTGGCGTAATCATGGTCATAGCTGTTTCCTGTG | |
| | | TTTATCCGCTCACAATTCCACACAACATACGAGCCGGAAGCATAAAG (SEQ ID. NO: | |
| | | 3300) | |

TABLE 3
RPA primers used in this study

| FIG. | Name | Sequence | Target |
|---|---|---|---|
| 3b | RPA | gaaatTAATACGACTCACTATAGGGCTAC | acyl- |
| | Acyltransferase F | GTGAATGCGCTGTTCGATG (SEQ ID. | transferase |
| | with T7 | NO: 3301) | |
| 3b | RPA | CATCACGTTCGGCGAAACAATCCAG | acyl- |
| | Acyltransferase R | (SEQ ID. NO: 3302) | transferase |
| 3c | RPA | gaaatTAATACGACTCACTATAGGGCTAC | acyl- |
| | Acyltransferase F | GTGAATGCGCTGTTCGATG (SEQ ID. | transferase |
| | with T7 | NO: 3303) | |
| 3c | RPA | CATCACGTTCGGCGAAACAATCCAG | acyl- |
| | Acyltransferase R | (SEQ ID. NO: 3304) | transferase |
| 3e | RPA | gaaatTAATACGACTCACTATAGGGCTAC | acyl- |
| | Acyltransferase F | GTGAATGCGCTGTTCGATG (SEQ ID. | transferase |
| | with T7 | NO: 3305) | |
| 3e | RPA | CATCACGTTCGGCGAAACAATCCAG | acyl- |
| | Acyltransferase R | (SEQ ID. NO: 3306) | transferase |
| 3h | RPA | gaaatTAATACGACTCACTATAGGGTGTA | thermo- |
| | Thermonuclease F | CAAAGGTCAACCAATGACATTCAG | nuclease |
| | with T7 | (SEQ ID. NO: 3307) | thermo- |
| 3h | RPA | TGCACTTGCTTCAGGACCATATTTC | nuclease |
| | Thermonuclease R | (SEQ ID. NO: 3308) | |
| 3i | RPA | gaaatTAATACGACTCACTATAGGGTGTA | thermo- |
| | Thermonuclease F | CAAAGGTCAACCAATGACATTCAG | nuclease |
| | with T7 | (SEQ ID. NO: 3309) | |
| 3i | RPA | TGCACTTGCTTCAGGACCATATTTC | thermo- |
| | Thermonuclease R | (SEQ ID. NO: 3310) | nuclease |
| 3k | RPA | gaaatTAATACGACTCACTATAGGGTGTA | thermo- |
| | Thermonuclease F | CAAAGGTCAACCAATGACATTCAG | nuclease |
| | with T7 | (SEQ ID. NO: 3311) | |
| 3k | RPA | TGCACTTGCTTCAGGACCATATTTC | thermo- |
| | Thermonuclease R | (SEQ ID. NO: 3312) | nuclease |
| 4b | Multiplexing RPA | gaaatTAATACGACTCACTATAGGGAGCG | thermo- |
| | Thermonuclease F | ATTGATGGTGATACTGTTAAA (SEQ | nuclease |
| | with T7 | ID. NO: 3313) | |
| 4b | Multiplexing RPA | TCGTAAATGCACTTGCTTCAGGACC | thermo- |
| | Thermonuclease R | (SEQ ID. NO: 3314) | nuclease |
| 4b | RPA Ea175 F with | gaaattaatacgactcactatagggGGCC | Ea175 |
| | T7 | AGTTTGAATAAGACAATG (SEQ ID. | |
| | | NO: 3315) | |
| 4b | RPA Ea175 R | GGCCAGTTTGAATAAGACAATG (SEQ | Ea175 |
| | | ID. NO: 3316) | |
| 4d | Multiplexing RPA | gaaatTAATACGACTCACTATAGGGAGCG | thermo- |
| | Thermonuclease F | ATTGATGGTGATACTGTTAAA (SEQ | nuclease |
| | with T7 | ID. NO: 3317) | |
| 4d | Multiplexing RPA | TCGTAAATGCACTTGCTTCAGGACC | thermo- |
| | Thermonuclease R | (SEQ ID. NO: 3318) | nuclease |
| 4d | RPA Ea175 F with | gaaattaatacgactcactatagggGGCC | Ea175 |
| | T7 | AGTTTGAATAAGACAATG (SEQ ID. | |
| | | NO: 3319) | |
| 4d | RPA Ea175 R | GGCCAGTTTGAATAAGACAATG (SEQ | Ea175 |
| | | ID. NO: 3320) | |
| 4e | Multiplexing RPA | gaaatTAATACGACTCACTATAGGGAGCG | thermo- |
| | Thermonuclease F | ATTGATGGTGATACTGTTAAA (SEQ | nuclease |
| | with T7 | ID. NO: 3321) | |
| 4e | Multiplexing RPA | TCGTAAATGCACTTGCTTCAGGACC | thermo- |
| | Thermonuclease R | (SEQ ID. NO: 3322) | nuclease |
| 4e | RPA Ea175 F with | gaaattaatacgactcactatagggGGCC | Ea175 |
| | T7 | AGTTTGAATAAGACAATG (SEQ ID. | |
| | | NO: 3323) | |
| 4e | RPA Ea175 R | GGCCAGTTTGAATAAGACAATG (SEQ | Ea175 |
| | | ID. NO: 3324) | |
| 8a | RPA Ea175 F with | gaaattaatacgactcactatagggGGCC | Ea175 |
| | T7 | AGTTTGAATAAGACAATG (SEQ ID. | |
| | | NO: 3325) | |
| 8a | RPA Ea175 R | GGCCAGTTTGAATAAGACAATG (SEQ | Ea175 |
| | | ID. NO: 3326) | |
| 8c | RPA Ea175 F with | gaaattaatacgactcactatagggGGCC | Ea175 |
| | T7 | AGTTTGAATAAGACAATG (SEQ ID. | |
| | | NO: 3327) | |
| 8c | RPA Ea175 R | GGCCAGTTTGAATAAGACAATG (SEQ | Ea175 |
| | | ID. NO: 3328) | |
| 8d | RPA Ea81 F with | gaaattaatacgactcactatagggATTG | Ea81 |
| | T7 | TTACATTGTACACATACA (SEQ ID. | |
| | | NO: 3329) | |
| 8d | RPA Ea81 R | ATTGTTACATTGTACACATACA (SEQ | Ea81 |
| | | ID. NO: 3330) | |
| 8f | RPA Ea81 F with | gaaattaatacgactcactatagggATTG | Ea81 |
| | T7 | TTACATTGTACACATACA (SEQ ID. | |
| | | NO: 3331) | |
| 8f | RPA Ea81 R | ATTGTTACATTGTACACATACA (SEQ | Ea81 |
| | | ID. NO: 3332) | |
| S3e | RPA Ea175 F with | gaaattaatacgactcactatagggGGCC | Ea175 |
| | T7 | AGTTTGAATAAGACAATG (SEQ ID. | |
| | | NO: 3333) | |
| S3e | RPA Ea175 R | TGAAACACAAGAATGGAAATGT (SEQ | Ea175 |
| | | ID. NO: 3334) | |
| 10b | RPA ssDNA1 F with | gaaattaatacgactcactatagggGATC | ssDNA1 |
| | T7 | CTCTAGAAATATGGATTACTTGGTAGAAC | |
| | | AG (SEQ ID. NO: 3335) | |
| 10b | RPA ssDNA1 R | GATAAACACAGGAAACAGCTATGACCATG | ssDNA1 |
| | | ATTACG (SEQ ID. NO: 3336) | |
| 10b | RPA lectin F with | gaaatTAATACGACTCACTATAGGGTCAA | Lectin |
| | T7 | TAAGGTTGACGAAAACGGCAC (SEQ | |
| | | ID. NO: 3337) | |
| 10b | RPA lectin R | TAGAAGGTGAAGTTGAAGGAAGCGG | Lectin |
| | | (SEQ ID. NO: 3338) | |
| 10c | RPA ssDNA1 F with | gaaattaatacgactcactatagggGATC | ssDNA1 |
| | T7 | CTCTAGAAATATGGATTACTTGGTAGAAC | |
| | | AG (SEQ ID. NO: 3339) | |
| 10c | RPA ssDNA1 R | GATAAACACAGGAAACAGCTATGACCATG | ssDNA1 |
| | | ATTACG (SEQ ID. NO: 3340) | |
| 10c | RPA lectin F with | gaaatTAATACGACTCACTATAGGGTCAA | Lectin |
| | T7 | TAAGGTTGACGAAAACGGCAC (SEQ | |
| | | ID. NO: 3341) | |
| 10c | RPA lectin R | TAGAAGGTGAAGTTGAAGGAAGCGG | Lectin |
| | | (SEQ ID. NO: 3342) | |

TABLE 4
HDA primers used in this study

| FIG. | Name | Sequence | Target |
|---|---|---|---|
| 9e | HDA | gaaattaatacgactcactatagggGG | Ea175 |
| | Ea175 F | CCAGTTTGAATAAGACAATG (SEQ | |
| | with T7 | ID. NO: 3343) | |
| 9e | HDA | TGAAACACAAGAATGGAAATGT (SEQ | Ea175 |
| | Ea175 R | ID. NO: 3344) | |

TABLE 5
Reporter sequences used in this study

| | | | Fluoro- | Antigen/ | Compatible |
|---|---|---|---|---|---|
| FIG. | Name | Sequence | phore | quencher | enzyme |
| 1b | Rnase Alert v2 | N/A | N/A | N/A | LwaCasl3a/ |
| | | | | | CcaCasl3b |
| 2a | Rnase Alert v2 | N/A | N/A | N/A | LwaCasl3a/ |
| | | | | | CcaCasl3b |
| 2b | Rnase Alert v2 | N/A | N/A | N/A | LwaCasl3a/ |
| | | | | | CcaCasl3b |
| 2c | Rnase Alert v2 | N/A | N/A | N/A | LwaCasl3a/ |
| | | | | | CcaCasl3b |
| 2d | Rnase Alert v2 | N/A | N/A | N/A | LwaCasl3a/ |
| | | | | | CcaCasl3b |
| 2e | Single-plex lateral | /56- | FAM | Biotin | LwaCas13a/ |
| | flow reporter | FAM/rUrUrUrUrUrU/ | | | CcaCasl3b |
| | | 3Bio/ (SEQ ID. | | | |
| | | NO: 3345) | | | |
| 2f | Single-plex lateral | /56- | FAM | Biotin | LwaCas13a/ |
| | flow reporter | FAM/rUrUrUrUrUrU/ | | | CcaCasl3b |
| | | 3Bio/ (SEQ ID. | | | |
| | | NO: 3345) | | | |
| 3b | Rnase Alert v2 | N/A | N/A | N/A | LwaCas13a/ |
| | | | | | CcaCasl3b |
| 3c | Rnase Alert v2 | N/A | N/A | N/A | LwaCas13a/ |
| | | | | | CcaCasl3b |
| 3e | Single-plex lateral | /56- | FAM | Biotin | LwaCas13a/ |
| | flow reporter | FAM/rUrUrUrUrU/ | | | CcaCasl3b |
| | | 3Bio/ (SEQ ID. | | | |
| | | NO: 3345) | | | |
| 3h | Poly-U reporter | /56- | FAM | Iowa | LwaCas13a/ |
| | | FAM/rUrUrUrUrUrU | | Black FQ | CcaCasl3b |
| | | 3IABkFQ/ (SEQ ID. | | | |
| | | NO: 3346) | | | |
| 3i | Poly-U reporter | /56- | FAM | Iowa | LwaCas13a/ |
| | | FAM/rUrUrUrUrU/ | | Black FQ | CcaCasl3b |
| | | 3IABkFQ/ (SEQ ID. | | | |
| | | NO: 3346) | | | |
| 3k | Single-plex lateral | /56- | FAM | Biotin | LwaCas13a/ |
| | flow reporter | FAM/rUrUrUrUrUrU/ | | | CcaCasl3b |
| | | 3Bio/ (SEQ ID. | | | |
| | | NO: 3345) | | | |
| 4b | LwaCas 13a | /56- | FAM | Iowa | LwaCas13a |
| | Fluorescence | FAM/TArArUGC/ | | Black FQ | |
| | reporter | 3IABkFQ/ | | | |
| 4b | CcaCasl3b | /5HEX/TArUrAGC/ | HEX | Iowa | CcaCasl3b |
| | Fluorescence | 3IABkFQ/ | | Black FQ | |
| | reporter | | | | |
| 4d | LwaCas13a Lateral | /5TYE665/T*A*rArU | TYE 665 | AlexaFlu | LwaCas13a |
| | Flow reporter | G*C*/3AlexF488N/ | | or 488 | |
| 4d | CcaCasl3b Lateral | /5TYE665/T*A*rUrA | TYE 665 | FAM | CcaCasl3b |
| | Flow reporter | G*C*/36-FAM/ | | | |
| 4e | LwaCas13a Lateral | /5TYE665/T*A*rArU | TYE 665 | AlexaFlu | LwaCas13a |
| | Flow reporter | G*C*/3AlexF488N/ | | or 488 | |
| 4e | CcaCasl3b Lateral | /5TYE665/T*A*rUrA | TYE 665 | FAM | CcaCasl3b |
| | Flow reporter | G*C*/36-FAM/ | | | |
| 5d | Rnase Alert v2 | N/A | N/A | N/A | LwaCas13a |
| 5e | Single-plex lateral | /56- | FAM | Biotin | LwaCas13a |
| | flow reporter | FAM/rUrUrUrUrUrU/ | | | |
| | | 3Bio/ (SEQ ID. | | | |
| | | NO: 3345) | | | |
| 5f | Single-plex lateral | /56- | FAM | Biotin | LwaCas13a |
| | flow reporter | FAM/rUrUrUrUrUrU/ | | | |
| | | 3Bio/ (SEQ ID. | | | |
| | | NO: 3345) | | | |
| 6b | LwaCas13a Lateral | /5TYE665/T*A*rArU | TYE 665 | AlexaFlu | LwaCas13a |
| | Flow reporter | G*C*/3AlexF488N/ | | or 488 | |
| 6b | CcaCasl3b Lateral | /5TYE665/T*A*rUrA | TYE 665 | FAM | CcaCasl3b |
| | Flow reporter | G*C*/36-FAM/ | | | |
| 6c | LwaCas13a Lateral | /5TYE665/T*A*rArU | TYE 665 | AlexaFlu | LwaCas13a |
| | Flow reporter | G*C*/3AlexF488N/ | | or 488 | |
| 6c | CcaCasl3b Lateral | /5TYE665/T*A*rUrA | TYE 665 | FAM | CcaCasl3b |
| | Flow reporter | G*C*/36-FAM/ | | | |
| 7a | Rnase Alert v2 | N/A | N/A | N/A | LwaCas13a/ |
| | | | | | CcaCasl3b |
| 8a | Rnase Alert v2 | N/A | N/A | N/A | LwaCas13a/ |
| | | | | | CcaCasl3b |
| 8c | Single-plex lateral | /56- | FAM | Biotin | LwaCas13a/ |
| | flow reporter | FAM/rUrUrUrUrUrU/ | | | CcaCasl3b |
| | | 3Bio/ (SEQ ID. | | | |
| | | NO: 3345) | | | |
| 10a | Poly-U reporter | /56- | FAM | Iowa | LwaCas13a/ |
| | | FAM/rUrUrUrUrU/ | | Black FQ | CcaCasl3b |
| | | 3IABkFQ/ (SEQ ID. | | | |
| | | NO: 3346) | | | |
| 10c | Single-plex lateral | /56- | FAM | Biotin | LwaCas13a/ |
| | flow reporter | FAM/rUrUrUrUrUrU/ | | | CcaCasl3b |
| | | 3Bio/ (SEQ ID. | | | |
| | | NO: 3345) | | | |
| 10d | Poly-U reporter | /56- | FAM | Iowa | LwaCas13a/ |
| | | FAM/rUrUrUrUrU/ | | Black FQ | CcaCasl3b |
| | | 3IABkFQ/ | | | |
| 10f | Single-plex lateral | /56- | FAM | Biotin | LwaCas13a/ |
| | flow reporter | FAM/rUrUrUrUrUrU/ | | | CcaCasl3b |
| | | 3Bio/ (SEQ ID. | | | |
| | | NO: 3345) | | | |
| 10b | Helicase reporter | /56- | FAM | N/A | UvrD |
| | FAM | FAM/CAGAGGAAC | | | helicases |
| | | GTCTATCTAACGG | | | |
| | | TTGGTATCTTGAA | | | |
| | | TGCTCAGTCCCTT | | | |
| | | T (SEQ ID. NO: | | | |
| | | 3347) | | | |
| 10b | Helicase reporter | AAAGGGACTGAG | N/A | BHQ-1 | UvrD |
| | BHQ1 | CATTCAAGATACC | | | helicases |
| | | AACCGTTAGATAG | | | |
| | | ACGTTCCTCTG/ | | | |
| | | 3BHQ_1/ (SEQ | | | |
| | | ID. NO: 3348) | | | |
| 10d | Poly-U reporter | /56- | FAM | Iowa | LwaCas13a/ |
| | | FAM/rUrUrUrUrU/ | | Black FQ | CcaCasl3b |
| | | 3IABkFQ/ (SEQ ID. | | | |
| | | NO: 3346) | | | |
| 10e | Poly-U reporter | /56- | FAM | Iowa | LwaCas13a/ |
| | | FAM/rUrUrUrUrU/ | | Black FQ | CcaCasl3b |
| | | 3IABkFQ/ (SEQ ID. | | | |
| | | NO: 3346) | | | |
| 11b | FAM LwaCas 13a | /56- | FAM | Biotin | LwaCas13a |
| | Lateral Flow | FAM/TArArUGC/ | | | |
| | reporter | 3Bio/ | | | |
| 11b | FAM CcaCasl3b | /56- | FAM | DIG | CcaCasl3b |
| | Lateral Flow | FAM/TArUrAGC/ | | | |
| | reporter | 3Dig_N/ | | | |
| 11c | FAM LwaCas 13a | /56- | FAM | Biotin | LwaCas13a |
| | Lateral Flow | FAM/TArArUGC/ | | | |
| | reporter | 3Bio/ | | | |
| 11c | FAM CcaCasl3b | /56- | FAM | DIG | CcaCasl3b |
| | Lateral Flow | FAM/TArUrAGC/ | | | |
| | reporter | 3Dig_N/ | | | |
| 11e | LwaCas13a Lateral | /5TYE665/T*A*rArU | TYE 665 | AlexaFlu | LwaCas13a |
| | Flow reporter | G*C*/3AlexF488N/ | | or 488 | |
| 11e | CcaCasl3b Lateral | /5TYE665/T*A*rUrA | TYE 665 | FAM | CcaCasl3b |
| | Flow reporter | G*C*/36-FAM/ | | | |
| 11e | AsCasl2a Lateral | /5TYE665/CCCCC/ | TYE 665 | DIG | AsCasl2a |
| | Flow reporter | 3Dig_N/ | | | |
| 11f | LwaCas13a Lateral | /5TYE665/T*A*rArU | TYE 665 | AlexaFlu | LwaCas13a |
| | Flow reporter | G*C*/3AlexF488N/ | | or 488 | |
| 11f | CcaCasl3b Lateral | /5TYE665/T*A*rUrA | TYE 665 | FAM | CcaCasl3b |
| | Flow reporter | G*C*/36-FAM/ | | | |
| 11f | AsCasl2a Lateral | /5TYE665/CCCCC/ | TYE 665 | DIG | AsCasl2a |
| | Flow reporter | 3Dig_N/ | | | |
| 12 | Single-plex lateral | /56- | FAM | Biotin | LwaCasl3a |
| | flow reporter | FAM/rUrUrUrUrUrU/ | | | |
| | | 3Bio/ (SEQ ID. | | | |
| | | NO: 3345) | | | |
| 14a | Rnase Alert v2 | N/A | N/A | N/A | LwaCasl3a/ |
| | | | | | CcaCasl3b |
| 14b | Rnase Alert v2 | N/A | N/A | N/A | LwaCasl3a/ |
| | | | | | CcaCasl3b |
| 14c | Rnase Alert v2 | N/A | N/A | N/A | LwaCasl3a/ |
| | | | | | CcaCasl3b |
| 14d | Rnase Alert v2 | N/A | N/A | N/A | LwaCasl3a/ |
| | | | | | CcaCasl3b |

TABLE 6
Cas13 proteins used in this study

| | Protein | | | Accession |
|---|---|---|---|---|
| Abbreviation | name | Strain name | Benchling link | number |
| Lwa | LwaCas13a | Leptotrichia | benchling.com/s/seq- | WP_021746774.1 |
| | | wadei | 66CfLwu7sLMQMbcXe7Ih | |
| Cca | CcaCas13b | Capnocytophaga | benchling.com/s/seq- | WP_013997271 |
| | | canimorsus | BNVzFUQjqSnkYLARxLwE | |

TABLE 7
Helicase proteins used in this study

| | | | | Accession number |
|---|---|---|---|---|
| | Protein | | Superhelicase | (lacks superhelicase |
| Abbreviation | name | Strain name | mutation | mutations) |
| Tte | Tte-UvrD | Thermoanaerobacter | − | AAM23874.1 |
| | | tengcongensis | | |
| Super Tte | Super Tte- | Thermoanaerobacter | + | AAM23874.1 |
| | UvrD | tengcongensis | | |
| Tet | Tet-UvrD | Thermoanaerobacter | − | WP_003870487.1 |
| | | ethanolicus | | |
| Super Tet | Super Tet- | Thermoanaerobacter | + | WP_003870487.1 |
| | UvrD | ethanolicus | | |
| Bsp | Bsp-UvrD | Bacillus sp. FJAT- | − | WP_049660019.1 |
| | | 27231 | | |
| Super Bsp | Super Bsp- | Bacillus sp. FJAT- | + | WP_049660019.1 |
| | UvrD | 27231 | | |
| Bme | Bme-UvrD | Bacillus megaterium | + | WP_034654680.1 |
| Bsi | Bsi-UvrD | Bacillus simplex | + | WP_095390358.1 |
| Pso | Pso-UvrD | Paeniclostridium | + | WP_055343022.1 |
| | | sordellii | | |

TABLE 8
patient samples with source, diagnosis, transcript, variant, and extracted RNA
concentration

| | | | | | | RNA |
|---|---|---|---|---|---|---|
| Sample | | | Chromosomal | Fusion | Transcript | Concentration |
| # | Source | Diagnosis | Translocation | Transcript | Variant | (ng/ul) |
| 1 | PB | APL | t(5; 17) | CLINT1- | N/A | 58.96 |
| | | | | RARA | | |
| 2 | BM | APL | t(15; 17) | PML- | Intron 6 | 124.1 |
| | | | | RARA | | |
| 3 | BM | APL | t(15; 17) | PML- | Intron 6 | 53.3 |
| | | | | RARA | | |
| 4 | BM | APL | t(15; 17) | PML- | Intron 6 | 69.73 |
| | | | | RARA | | |
| 5 | BM | APL | t(15; 17) | PML- | Intron 6 | 469.5 |
| | | | | RARA | | |
| 6 | BM | APL | t(15; 17) | PML- | Exon 6 | 43.96 |
| | | | | RARA | | |
| 7 | BM | APL | t(15; 17) | PML- | Intron 3 | 44.44 |
| | | | | RARA | | |
| 8 | BM | APL | t(15; 17) | PML- | Intron 3 | 25.33 |
| | | | | RARA | | |
| 9 | BM | APL | t(15; 17) | PML- | Intron 3 | 50.18 |
| | | | | RARA | | |
| 10 | BM | APL | t(15; 17) | PML- | Intron 3 | 262.5 |
| | | | | RARA | | |
| 11 | BM | APL | t(15; 17) | PML- | Intron 3 | 191.1 |
| | | | | RARA | | |
| 12 | PB | APL | t(15; 17) | PML- | Intron 3 | 103.6 |
| | | | | RARA | | |
| 13 | BM | ALL | t(9; 22) | BCR- | p210- | 30.98 |
| | | | | ABL | e14a2 | |
| 14 | BM | CML | t(9; 22) | BCR- | p210- | 44.9 |
| | | | | ABL | e14a2 | |
| 15 | BM | CML | t(9; 22) | BCR- | p210- | 225.6 |
| | | | | ABL | e14a2 | |
| 16 | BM | ALL | t(9; 22) | BCR- | p210- | 18.43 |
| | | | | ABL | e13a2 | |
| 17 | BM | CML | t(9; 22) | BCR- | p210- | 38.24 |
| | | | | ABL | e13a2 | |
| 18 | BM | ALL | t(9; 22) | BCR- | p190- | 52.18 |
| | | | | ABL | e1a2 | |
| 19 | BM | ALL | t(9; 22) | BCR- | p190- | 205.6 |
| | | | | ABL | e1a2 | |

TABLE 9
RT-PCR primers for PML-RARA and BCR-ABL fusions

| | | | PCR | | |
|---|---|---|---|---|---|
| Target | Primer | Direction | Round | Sequence (5′-3′) | SEQ ID. NO |
| PML- | PML-A1 | Forward | 1 | CAGTGTACGCCTTCTCCATCA | SEQ ID. NO: |
| RARA | | | | | 3349 |
| | PML-A2 | Forward | 1 | CTGCTGGAGGCTGTGGAC | SEQ ID. NO: |
| | | | | | 3350 |
| | RARA-B | Reverse | 1 | GCTTGTAGATGCGGGGTAGA | SEQ ID. NO: |
| | | | | | 3351 |
| | PML-C1 | Forward | 2 | TCAAGATGGAGTCTGAGGAGG | SEQ ID. NO: |
| | | | | | 3352 |
| | PML-C2 | Forward | 2 | AGCGCGACTACGAGGAGAT | SEQ ID. NO: |
| | | | | | 3353 |
| | RARA-D | Reverse | 2 | CTGCTGCTCTGGGTCTCAAT | SEQ ID. NO: |
| | | | | | 3354 |
| BCR- | BCR-b1- | Forward | 1 | GAAGTGTTTCAGAAGCTTCTC | SEQ ID. NO: |
| ABL | A | | | C | 3355 |
| p210 | | | | | |
| | ABL-a3- | Reverse | 1 | GTTTGGGCTTCACACCATTCC | SEQ ID. NO: |
| | B | | | | 3356 |
| | BCR-b2- | Forward | 2 | CAGATGCTGACCAACTCGTGT | SEQ ID. NO: |
| | C | | | | 3357 |
| | ABL-a3- | Reverse | 2 | TTCCCCATTGTGATTATAGCC | SEQ ID. NO: |
| | D | | | TA | 3358 |
| BCR- | BCR-e1- | Forward | 1 | GACTGCAGCTCCAATGAGAAC | SEQ ID. NO: |
| ABL | A | | | | 3359 |
| p190 | | | | | |
| | ABL-a3- | Reverse | 1 | GTTTGGGCTTCACACCATTCC | SEQ ID. NO: |
| | B | | | | 3360 |
| | BCR-e1- | Forward | 2 | CAGAACTCGCAACAGTCCTTC | SEQ ID. NO: |
| | C | | | | 3361 |
| | ABL-a3- | Reverse | 2 | TTCCCCATTGTGATTATAGCC | SEQ ID. NO: |
| | D | | | TA | 3362 |
| GAPDH | GAPDH- | Forward | 1 | GCACCGTCAAGGCTGAGAAC | SEQ ID. NO: |
| | For | | | | 3363 |
| | GAPDH- | Reverse | 1 | TGGTGAAGACGCCAGTGGA | SEQ ID. NO: |
| | Rev | | | | 3364 |

### REFERENCES

[0315] 1 Gootenberg, J. S. et al. Multiplexed and portable nucleic acid detection platform with Cas13, Cas12a, and Csm6. Science, doi:10.1126/science.aaq0179 (2018).

[0316] 2 Gootenberg, J. S. et al. Nucleic acid detection with CRISPR-Cas13a/C2c2. Science 356, 438-442, doi:10.1126/science.aam9321 (2017).

[0317] 3 Abudayyeh, O. O. et al. C2c2 is a single-component programmable RNA-guided RNA-targeting CRISPR effector. Science 353, aaf5573, doi:10.1126/science.aaf5573 (2016).

[0318] 4 East-Seletsky, A. et al. Two distinct RNase activities of CRISPR-C2c2 enable guide-RNA processing and RNA detection. Nature 538, 270-273, doi:10.1038/nature19802 (2016).

[0319] 5 Shmakov, S. et al. Discovery and Functional Characterization of Diverse Class 2 CRISPR-Cas Systems. Mol Cell 60, 385-397, doi:10.1016/j.molce1.2015.10.008 (2015).

[0320] 6 Smargon, A. A. et al. Cas13b Is a Type VI-B CRISPR-Associated RNA-Guided RNase Differentially Regulated by Accessory Proteins Csx27 and Csx28. Mol Cell 65, 618-630 e617, doi:10.1016/j.molce1.2016.12.023 (2017).

[0321] 7 Shmakov, S. et al. Diversity and evolution of class 2 CRISPR-Cas systems. Nat Rev Microbiol 15, 169-182, doi:10.1038/nrmicro.2016.184 (2017).

[0322] 8 Zetsche, B. et al. Cpf1 is a single RNA-guided endonuclease of a class 2 CRISPR-Cas system. Cell 163, 759-771, doi:10.1016/j.ce11.2015.09.038 (2015).

[0323] 9 Chen, J. S. et al. CRISPR-Cas12a target binding unleashes indiscriminate single-stranded DNase activity. Science, doi:10.1126/science.aar6245 (2018).

[0324] 10 Myhrvold, C. et al. Field-deployable viral diagnostics using CRISPR-Cas13. Science 360, 444-448, doi:10.1126/science.aas8836 (2018).

[0325] 11 Li, S. Y. et al. CRISPR-Cas12a-assisted nucleic acid detection. Cell Discov 4, 20, doi:10.1038/101421-018-0028-z (2018).

[0326] 12 Li, L., Li, S. & Wang, J. CRISPR-Cas12b-assisted nucleic acid detection platform. bioRxiv, 362889, doi:10.1101/362889 (2018).

[0327] 13 Konermann, S. et al. Transcriptome Engineering with RNA-Targeting Type VI-D CRISPR Effectors. Cell, doi:10.1016/j.ce11.2018.02.033 (2018).

[0328] 14 Abudayyeh, 0. 0. etal. RNA targeting with CRISPR-Cas13. Nature 550, 280-284, doi:10.1038/nature24049 (2017).

[0329] 15 Cox, D. B. T. etal. RNA editing with CRISPR-Cas13. Science 358, 1019-1027, doi:10.1126/science.aaq0180 (2017).

[0330] 16 Zhao, X. et al. A CRISPR-Cas13a system for efficient and specific therapeutic targeting of mutant KRAS for pancreatic cancer treatment. Cancer Lett 431, 171-181, doi:10.1016/j.canlet.2018.05.042 (2018).

[0331] 17 Hsu, P. D. et al. DNA targeting specificity of RNA-guided Cas9 nucleases. Nat Biotechnol 31, 827-832, doi:10.1038/nbt.2647 (2013).

[0332] 18 Doench, J. G. et al. Rational design of highly active sgRNAs for CRISPR-Cas9-mediated gene inactivation. Nat Biotechnol 32, 1262-1267, doi:10.1038/nbt.3026 (2014).

[0333] 19 Piepenburg, O., Williams, C. H., Stemple, D. L. & Armes, N. A. DNA detection using recombination proteins. PLoS Biol 4, e204, doi:10.1371/journal.pbio.0040204 (2006).

[0334] 20 Vincent, M., Xu, Y. & Kong, H. Helicase-dependent isothermal DNA amplification. EMBO Rep 5, 795-800, doi:10.1038/sj.embor.7400200 (2004).

[0335] 21 Meiners, M. J., Tahmaseb, K. & Matson, S. W. The UvrD303 hyper-helicase exhibits increased processivity. J Biol Chem 289, 17100-17110, doi:10.1074/jbc.M114.565309 (2014).

[0336] 22 Ozes, A. R., Feoktistova, K., Avanzino, B. C., Baldwin, E. P. & Fraser, C. S. Real-time fluorescence assays to monitor duplex unwinding and ATPase activities of helicases. Nat Protoc 9, 1645-1661, doi:10.1038/nprot.2014.112 (2014).

[0337] 23 van der Velden, V. H. et al. Detection of minimal residual disease in hematologic malignancies by real-time quantitative PCR: principles, approaches, and laboratory aspects. Leukemia 17, 1013-1034, doi:10.1038/sj.leu.2402922 (2003).

[0338] 24 Yan, W. X. et al. Cas13d Is a Compact RNA-Targeting Type VI CRISPR Effector Positively Modulated by a WYL-Domain-Containing Accessory Protein. Mol Cell, doi:10.1016/j.molcel.2018.02.028 (2018).

[0339] 25 Yan, W. X. et al. Functionally diverse type V CRISPR-Cas systems. Science 363, 88-91, doi:10.1126/science.aav7271 (2019).

[0340] 26 Ye, J. et al. Primer-BLAST: a tool to design target-specific primers for polymerase chain reaction. BMC Bioinformatics 13, 134, doi:10.1186/1471-2105-13-134 (2012).

[0341] 27 An, L. et al. Characterization of a thermostable UvrD helicase and its participation in helicase-dependent amplification. J Biol Chem 280, 28952-28958, doi:10.1074/jbc.M503096200 (2005).

[0342] 28 van Dongen, J. J. et al. Standardized RT-PCR analysis of fusion gene transcripts from chromosome aberrations in acute leukemia for detection of minimal residual disease. Report of the BIOMED-1 Concerted Action: investigation of minimal residual disease in acute leukemia. Leukemia 13, 1901-1928 (1999); doi:/10.1038/sj.leu.2401592 (1999).

[0343] Various modifications and variations of the described methods, pharmaceutical compositions, and kits of the invention will be apparent to those skilled in the art without departing from the scope and spirit of the invention. Although the invention has been described in connection with specific embodiments, it will be understood that it is capable of further modifications and that the invention as claimed should not be unduly limited to such specific embodiments. Indeed, various modifications of the described modes for carrying out the invention that are obvious to those skilled in the art are intended to be within the scope of the invention. This application is intended to cover any variations, uses, or adaptations of the invention following, in general, the principles of the invention and including such departures from the present disclosure come within known customary practice within the art to which the invention pertains and may be applied to the essential features herein before set forth.

The application's sequence listing, which the Patent Office published only in electronic form, follows.

SEQUENCE LISTING (3364 sequences)

SEQ ID NO: 1 - protein, 6 aa, Artificial Sequence
  Synthetic
  x (3)..(3): r,s,d,e,q,n,g,y,h
  x (4)..(4): i,s,t,v,l
  x (5)..(5): l,f,n,y,v,i,s,d,e,a
RNXXXH

SEQ ID NO: 2 - protein, 6 aa, Artificial Sequence
  Synthetic
  x (3)..(3): r,s,d,e,q,n,g,y,h
  x (4)..(4): i,s,t,v,l
  x (5)..(5): L, F, N, Y, V, I, S, D, E,  A
RHXXXH

SEQ ID NO: 3 - protein, 6 aa, Artificial Sequence
  Synthetic
  x (3)..(3): R, S, D, E, Q, N, G, Y, or H
  x (4)..(4): R, S, D, E, Q, N, G, Y, or H
  x (5)..(5): L, F, N, Y, V, I, S, D, E, or A
RKXXXH

SEQ ID NO: 4 - protein, 6 aa, Artificial Sequence
  Synthetic
  x (3)..(3): R, S, D, E, Q, N, G, Y, or H
  x (4)..(4): I, S, T, V, or L
  x (5)..(5): L, F, N, Y, V, I, S, D, E, or A
RNXXXH

SEQ ID NO: 5 - protein, 6 aa, Artificial Sequence
  Synthetic
  x (3)..(3): R, S, D, E, Q, N, G, Y, or H
  x (4)..(4): I, S, T, V, or L
  x (5)..(5): L, F, N, Y, V, I, S, D, E, or A
RKXXXH

SEQ ID NO: 6 - protein, 4 aa, Artificial Sequence
  Synthetic
TTTN

SEQ ID NO: 7 - protein, 4 aa, Artificial Sequence
  Synthetic
CTTN

SEQ ID NO: 8 - RNA, 25 nt, Artificial Sequence
  Synthetic
gggaacaaagcugaaguacuuaccc

SEQ ID NO: 9 - DNA, 18 bp, Artificial Sequence
  Synthetic
gggtagggcgggttggga

SEQ ID NO: 10 - RNA, 12 nt, Artifical Sequence
  misc_feature (1)..(1): Biotin Tag = /5Biosg/
  misc_feature (12)..(12): 3IAbRQSp=Iowa black quencher
ucucguacguuc

SEQ ID NO: 11 - RNA, 24 nt, Artificial Sequence
  Synthetic
  misc_feature (1)..(1): Biotin tag = /5Biosg/
  misc_feature (24)..(24): 3lAbRQSp=Iowa black quencher
ucucguacguucucucguacguuc

SEQ ID NO: 12 - DNA, 64 bp, Dengue Virus
gatttagactaccccaaaaacgaaggggactaaaacttgagaggttggcccctgaatatgtact

SEQ ID NO: 13 - DNA, 28 bp, Dengue Virus
ttgagaggttggcccctgaatatgtact

SEQ ID NO: 14 - DNA, 36 bp, Dengue Virus
gatttagactaccccaaaaacgaaggggactaaaac

SEQ ID NO: 15 - DNA, 64 bp, Dengue Virus
gatttagactaccccaaaaacgaaggggactaaaacgttgagaggttggcccctgaatatgtac

SEQ ID NO: 16 - DNA, 28 bp, Dengue Virus
gttgagaggttggcccctgaatatgtac

SEQ ID NO: 17 - DNA, 36 bp, Dengue Virus; identical to SEQ ID NO: 14

SEQ ID NO: 18 - DNA, 64 bp, Dengue Virus
gatttagactaccccaaaaacgaaggggactaaaactgttgagaggttggcccctgaatatgta

SEQ ID NO: 19 - DNA, 28 bp, Dengue Virus
tgttgagaggttggcccctgaatatgta

SEQ ID NO: 20 - DNA, 36 bp, Dengue Virus; identical to SEQ ID NO: 14

SEQ ID NO: 21 - DNA, 64 bp, Dengue Virus
gatttagactaccccaaaaacgaaggggactaaaacttgttgagaggttggcccctgaatatgt

SEQ ID NO: 22 - DNA, 28 bp, Dengue Virus
ttgttgagaggttggcccctgaatatgt

SEQ ID NO: 23 - DNA, 36 bp, Dengue Virus; identical to SEQ ID NO: 14

SEQ ID NO: 24 - DNA, 64 bp, Dengue Virus
gatttagactaccccaaaaacgaaggggactaaaacattgttgagaggttggcccctgaatatg

SEQ ID NO: 25 - DNA, 28 bp, Dengue Virus
attgttgagaggttggcccctgaatatg

SEQ ID NO: 26 - DNA, 36 bp, Dengue Virus; identical to SEQ ID NO: 14

SEQ ID NO: 27 - DNA, 64 bp, Dengue Virus
gatttagactaccccaaaaacgaaggggactaaaaccattgttgagaggttggcccctgaatat

SEQ ID NO: 28 - DNA, 28 bp, Dengue Virus
cattgttgagaggttggcccctgaatat

SEQ ID NO: 29 - DNA, 36 bp, Dengue Virus; identical to SEQ ID NO: 14

SEQ ID NO: 30 - DNA, 64 bp, Dengue Virus
gatttagactaccccaaaaacgaaggggactaaaactcattgttgagaggttggcccctgaata

SEQ ID NO: 31 - DNA, 28 bp, Dengue Virus
tcattgttgagaggttggcccctgaata

SEQ ID NO: 32 - DNA, 36 bp, Dengue Virus; identical to SEQ ID NO: 14

SEQ ID NO: 33 - DNA, 64 bp, Dengue Virus
gatttagactaccccaaaaacgaaggggactaaaacgtcattgttgagaggttggcccctgaat

SEQ ID NO: 34 - DNA, 28 bp, Dengue Virus
gtcattgttgagaggttggcccctgaat

SEQ ID NO: 35 - DNA, 36 bp, Dengue Virus; identical to SEQ ID NO: 14

SEQ ID NO: 36 - DNA, 64 bp, Dengue Virus
gatttagactaccccaaaaacgaaggggactaaaaccgtcattgttgagaggttggcccctgaa

SEQ ID NO: 37 - DNA, 28 bp, Dengue Virus
cgtcattgttgagaggttggcccctgaa

SEQ ID NO: 38 - DNA, 36 bp, Dengue Virus; identical to SEQ ID NO: 14

SEQ ID NO: 39 - DNA, 64 bp, Dengue Virus
gatttagactaccccaaaaacgaaggggactaaaactcgtcattgttgagaggttggcccctga

SEQ ID NO: 40 - DNA, 28 bp, Dengue Virus
tcgtcattgttgagaggttggcccctga

SEQ ID NO: 41 - DNA, 36 bp, Dengue Virus; identical to SEQ ID NO: 14

SEQ ID NO: 42 - DNA, 64 bp, Dengue Virus
gatttagactaccccaaaaacgaaggggactaaaacttcgtcattgttgagaggttggcccctg

SEQ ID NO: 43 - DNA, 28 bp, Dengue Virus
ttcgtcattgttgagaggttggcccctg

SEQ ID NO: 44 - DNA, 36 bp, Dengue Virus; identical to SEQ ID NO: 14

SEQ ID NO: 45 - DNA, 64 bp, Dengue Virus
gatttagactaccccaaaaacgaaggggactaaaaccttcgtcattgttgagaggttggcccct

SEQ ID NO: 46 - DNA, 28 bp, Dengue Virus
cttcgtcattgttgagaggttggcccct

SEQ ID NO: 47 - DNA, 36 bp, Dengue Virus; identical to SEQ ID NO: 14

SEQ ID NO: 48 - DNA, 64 bp, Dengue Virus
gatttagactaccccaaaaacgaaggggactaaaactcttcgtcattgttgagaggttggcccc

SEQ ID NO: 49 - DNA, 28 bp, Dengue Virus
tcttcgtcattgttgagaggttggcccc

SEQ ID NO: 50 - DNA, 36 bp, Dengue Virus; identical to SEQ ID NO: 14

SEQ ID NO: 51 - DNA, 64 bp, Dengue Virus
gatttagactaccccaaaaacgaaggggactaaaacgtcttcgtcattgttgagaggttggccc

SEQ ID NO: 52 - DNA, 28 bp, Dengue Virus
gtcttcgtcattgttgagaggttggccc

SEQ ID NO: 53 - DNA, 36 bp, Dengue Virus; identical to SEQ ID NO: 14

SEQ ID NO: 54 - DNA, 64 bp, Dengue Virus
gatttagactaccccaaaaacgaaggggactaaaacggtcttcgtcattgttgagaggttggcc

SEQ ID NO: 55 - DNA, 28 bp, Dengue Virus
ggtcttcgtcattgttgagaggttggcc

SEQ ID NO: 56 - DNA, 36 bp, Dengue Virus; identical to SEQ ID NO: 14

SEQ ID NO: 57 - DNA, 64 bp, Dengue Virus
gatttagactaccccaaaaacgaaggggactaaaactggtcttcgtcattgttgagaggttggc

SEQ ID NO: 58 - DNA, 28 bp, Dengue Virus
tggtcttcgtcattgttgagaggttggc

SEQ ID NO: 59 - DNA, 36 bp, Dengue Virus; identical to SEQ ID NO: 14

SEQ ID NO: 60 - DNA, 64 bp, Dengue Virus
gatttagactaccccaaaaacgaaggggactaaaacatggtcttcgtcattgttgagaggttgg

SEQ ID NO: 61 - DNA, 28 bp, Dengue Virus
atggtcttcgtcattgttgagaggttgg

SEQ ID NO: 62 - DNA, 36 bp, Dengue Virus; identical to SEQ ID NO: 14

SEQ ID NO: 63 - DNA, 64 bp, Dengue Virus
gatttagactaccccaaaaacgaaggggactaaaaccatggtcttcgtcattgttgagaggttg

SEQ ID NO: 64 - DNA, 28 bp, Dengue Virus
catggtcttcgtcattgttgagaggttg

SEQ ID NO: 65 - DNA, 36 bp, Dengue Virus; identical to SEQ ID NO: 14

SEQ ID NO: 66 - DNA, 64 bp, Dengue Virus
gatttagactaccccaaaaacgaaggggactaaaacgcatggtcttcgtcattgttgagaggtt

SEQ ID NO: 67 - DNA, 28 bp, Dengue Virus
gcatggtcttcgtcattgttgagaggtt

SEQ ID NO: 68 - DNA, 36 bp, Dengue Virus; identical to SEQ ID NO: 14

SEQ ID NO: 69 - DNA, 64 bp, Dengue Virus
gatttagactaccccaaaaacgaaggggactaaaacagcatggtcttcgtcattgttgagaggt

SEQ ID NO: 70 - DNA, 28 bp, Dengue Virus
agcatggtcttcgtcattgttgagaggt

SEQ ID NO: 71 - DNA, 36 bp, Dengue Virus; identical to SEQ ID NO: 14

SEQ ID NO: 72 - DNA, 64 bp, Dengue Virus
gatttagactaccccaaaaacgaaggggactaaaactgagcatggtcttcgtcattgttgagag

SEQ ID NO: 73 - DNA, 28 bp, Dengue Virus
tgagcatggtcttcgtcattgttgagag

SEQ ID NO: 74 - DNA, 36 bp, Dengue Virus; identical to SEQ ID NO: 14

SEQ ID NO: 75 - DNA, 64 bp, Dengue Virus
gatttagactaccccaaaaacgaaggggactaaaacagtgagcatggtcttcgtcattgttgag

SEQ ID NO: 76 - DNA, 28 bp, Dengue Virus
agtgagcatggtcttcgtcattgttgag

SEQ ID NO: 77 - DNA, 36 bp, Dengue Virus; identical to SEQ ID NO: 14

SEQ ID NO: 78 - DNA, 64 bp, Dengue Virus
gatttagactaccccaaaaacgaaggggactaaaacccagtgagcatggtcttcgtcattgttg

SEQ ID NO: 79 - DNA, 28 bp, Dengue Virus
ccagtgagcatggtcttcgtcattgttg

SEQ ID NO: 80 - DNA, 36 bp, Dengue Virus; identical to SEQ ID NO: 14

SEQ ID NO: 81 - DNA, 64 bp, Dengue Virus
gatttagactaccccaaaaacgaaggggactaaaacgtccagtgagcatggtcttcgtcattgt

SEQ ID NO: 82 - DNA, 28 bp, Dengue Virus
gtccagtgagcatggtcttcgtcattgt

SEQ ID NO: 83 - DNA, 36 bp, Dengue Virus; identical to SEQ ID NO: 14

SEQ ID NO: 84 - DNA, 64 bp, Dengue Virus
gatttagactaccccaaaaacgaaggggactaaaacctgtccagtgagcatggtcttcgtcatt

SEQ ID NO: 85 - DNA, 28 bp, Dengue Virus
ctgtccagtgagcatggtcttcgtcatt

SEQ ID NO: 86 - DNA, 36 bp, Dengue Virus; identical to SEQ ID NO: 14

SEQ ID NO: 87 - DNA, 64 bp, Dengue Virus
gatttagactaccccaaaaacgaaggggactaaaacttctgtccagtgagcatggtcttcgtca

SEQ ID NO: 88 - DNA, 28 bp, Dengue Virus
ttctgtccagtgagcatggtcttcgtca

SEQ ID NO: 89 - DNA, 36 bp, Dengue Virus; identical to SEQ ID NO: 14

SEQ ID NO: 90 - DNA, 64 bp, Dengue Virus
gatttagactaccccaaaaacgaaggggactaaaacgcttctgtccagtgagcatggtcttcgt

SEQ ID NO: 91 - DNA, 28 bp, Dengue Virus
gcttctgtccagtgagcatggtcttcgt

SEQ ID NO: 92 - DNA, 36 bp, Dengue Virus; identical to SEQ ID NO: 14

SEQ ID NO: 93 - DNA, 64 bp, Dengue Virus
gatttagactaccccaaaaacgaaggggactaaaacttgcttctgtccagtgagcatggtcttc

SEQ ID NO: 94 - DNA, 28 bp, Dengue Virus
ttgcttctgtccagtgagcatggtcttc

SEQ ID NO: 95 - DNA, 36 bp, Dengue Virus; identical to SEQ ID NO: 14

SEQ ID NO: 96 - DNA, 64 bp, Dengue Virus
gatttagactaccccaaaaacgaaggggactaaaacttttgcttctgtccagtgagcatggtct

SEQ ID NO: 97 - DNA, 28 bp, Dengue Virus
ttttgcttctgtccagtgagcatggtct

SEQ ID NO: 98 - DNA, 36 bp, Dengue Virus; identical to SEQ ID NO: 14

SEQ ID NO: 99 - DNA, 64 bp, Dengue Virus
gatttagactaccccaaaaacgaaggggactaaaacatttttgcttctgtccagtgagcatggt

SEQ ID NO: 100 - DNA, 28 bp, Dengue Virus
atttttgcttctgtccagtgagcatggt

SEQ ID NO: 101 - DNA, 36 bp, Dengue Virus; identical to SEQ ID NO: 14

SEQ ID NO: 102 - DNA, 64 bp, Dengue Virus
gatttagactaccccaaaaacgaaggggactaaaacgcatttttgcttctgtccagtgagcatg

SEQ ID NO: 103 - DNA, 28 bp, Dengue Virus
gcatttttgcttctgtccagtgagcatg

SEQ ID NO: 104 - DNA, 36 bp, Dengue Virus; identical to SEQ ID NO: 14

SEQ ID NO: 105 - DNA, 64 bp, Dengue Virus
gatttagactaccccaaaaacgaaggggactaaaaccagcatttttgcttctgtccagtgagca

SEQ ID NO: 106 - DNA, 28 bp, Dengue Virus
cagcatttttgcttctgtccagtgagca

SEQ ID NO: 107 - DNA, 36 bp, Dengue Virus; identical to SEQ ID NO: 14

SEQ ID NO: 108 - DNA, 64 bp, Dengue Virus
gatttagactaccccaaaaacgaaggggactaaaacagcagcatttttgcttctgtccagtgag

SEQ ID NO: 109 - DNA, 28 bp, Dengue Virus
agcagcatttttgcttctgtccagtgag

SEQ ID NO: 110 - DNA, 36 bp, Dengue Virus; identical to SEQ ID NO: 14

SEQ ID NO: 111 - DNA, 64 bp, Dengue Virus
gatttagactaccccaaaaacgaaggggactaaaacccagcagcatttttgcttctgtccagtg

SEQ ID NO: 112 - DNA, 28 bp, Dengue Virus
ccagcagcatttttgcttctgtccagtg

SEQ ID NO: 113 - DNA, 36 bp, Dengue Virus; identical to SEQ ID NO: 14

SEQ ID NO: 114 - DNA, 64 bp, Dengue Virus
gatttagactaccccaaaaacgaaggggactaaaacgtccagcagcatttttgcttctgtccag

SEQ ID NO: 115 - DNA, 28 bp, Dengue Virus
gtccagcagcatttttgcttctgtccag

SEQ ID NO: 116 - DNA, 36 bp, Dengue Virus; identical to SEQ ID NO: 14

SEQ ID NO: 117 - DNA, 64 bp, Dengue Virus
gatttagactaccccaaaaacgaaggggactaaaacttgtccagcagcatttttgcttctgtcc

SEQ ID NO: 118 - DNA, 28 bp, Dengue Virus
ttgtccagcagcatttttgcttctgtcc

SEQ ID NO: 119 - DNA, 36 bp, Dengue Virus; identical to SEQ ID NO: 14

SEQ ID NO: 120 - DNA, 64 bp, Dengue Virus
gatttagactaccccaaaaacgaaggggactaaaactgttgtccagcagcatttttgcttctgt

SEQ ID NO: 121 - DNA, 28 bp, Dengue Virus
tgttgtccagcagcatttttgcttctgt

SEQ ID NO: 122 - DNA, 36 bp, Dengue Virus; identical to SEQ ID NO: 14

SEQ ID NO: 123 - DNA, 64 bp, Dengue Virus
gatttagactaccccaaaaacgaaggggactaaaacgatgttgtccagcagcatttttgcttct

SEQ ID NO: 124 - DNA, 28 bp, Dengue Virus
gatgttgtccagcagcatttttgcttct

SEQ ID NO: 125 - DNA, 36 bp, Dengue Virus; identical to SEQ ID NO: 14

SEQ ID NO: 126 - DNA, 64 bp, Dengue Virus
gatttagactaccccaaaaacgaaggggactaaaacttgatgttgtccagcagcatttttgctt

SEQ ID NO: 127 - DNA, 28 bp, Dengue Virus
ttgatgttgtccagcagcatttttgctt

SEQ ID NO: 128 - DNA, 36 bp, Dengue Virus; identical to SEQ ID NO: 14

SEQ ID NO: 129 - DNA, 64 bp, Dengue Virus
gatttagactaccccaaaaacgaaggggactaaaactgttgatgttgtccagcagcatttttgc

SEQ ID NO: 130 - DNA, 28 bp, Dengue Virus
tgttgatgttgtccagcagcatttttgc

SEQ ID NO: 131 - DNA, 36 bp, Dengue Virus; identical to SEQ ID NO: 14

SEQ ID NO: 132 - DNA, 64 bp, Dengue Virus
gatttagactaccccaaaaacgaaggggactaaaactgtgttgatgttgtccagcagcattttt

SEQ ID NO: 133 - DNA, 28 bp, Dengue Virus
tgtgttgatgttgtccagcagcattttt

SEQ ID NO: 134 - DNA, 36 bp, Dengue Virus; identical to SEQ ID NO: 14

SEQ ID NO: 135 - DNA, 64 bp, Dengue Virus
gatttagactaccccaaaaacgaaggggactaaaacggtgtgttgatgttgtccagcagcattt

SEQ ID NO: 136 - DNA, 28 bp, Dengue Virus
ggtgtgttgatgttgtccagcagcattt

SEQ ID NO: 137 - DNA, 36 bp, Dengue Virus; identical to SEQ ID NO: 14

SEQ ID NO: 138 - DNA, 64 bp, Dengue Virus
gatttagactaccccaaaaacgaaggggactaaaacctggtgtgttgatgttgtccagcagcat

SEQ ID NO: 139 - DNA, 28 bp, Dengue Virus
ctggtgtgttgatgttgtccagcagcat

SEQ ID NO: 140 - DNA, 36 bp, Dengue Virus; identical to SEQ ID NO: 14

SEQ ID NO: 141 - DNA, 64 bp, Dengue Virus
gatttagactaccccaaaaacgaaggggactaaaacttctggtgtgttgatgttgtccagcagc

SEQ ID NO: 142 - DNA, 28 bp, Dengue Virus
ttctggtgtgttgatgttgtccagcagc

SEQ ID NO: 143 - DNA, 36 bp, Dengue Virus; identical to SEQ ID NO: 14

SEQ ID NO: 144 - DNA, 64 bp, Dengue Virus
gatttagactaccccaaaaacgaaggggactaaaacccttctggtgtgttgatgttgtccagca

SEQ ID NO: 145 - DNA, 28 bp, Dengue Virus
ccttctggtgtgttgatgttgtccagca

SEQ ID NO: 146 - DNA, 36 bp, Dengue Virus; identical to SEQ ID NO: 14

SEQ ID NO: 147 - DNA, 64 bp, Dengue Virus
gatttagactaccccaaaaacgaaggggactaaaactcccttctggtgtgttgatgttgtccag

SEQ ID NO: 148 - DNA, 28 bp, Dengue Virus
tcccttctggtgtgttgatgttgtccag

SEQ ID NO: 149 - DNA, 36 bp, Dengue Virus; identical to SEQ ID NO: 14

SEQ ID NO: 150 - DNA, 64 bp, Dengue Virus
gatttagactaccccaaaaacgaaggggactaaaacaatcccttctggtgtgttgatgttgtcc

SEQ ID NO: 151 - DNA, 28 bp, Dengue Virus
aatcccttctggtgtgttgatgttgtcc

SEQ ID NO: 152 - DNA, 36 bp, Dengue Virus; identical to SEQ ID NO: 14

SEQ ID NO: 153 - DNA, 64 bp, Dengue Virus
gatttagactaccccaaaaacgaaggggactaaaacataatcccttctggtgtgttgatgttgt

SEQ ID NO: 154 - DNA, 28 bp, Dengue Virus
ataatcccttctggtgtgttgatgttgt

SEQ ID NO: 155 - DNA, 36 bp, Dengue Virus; identical to SEQ ID NO: 14

SEQ ID NO: 156 - DNA, 64 bp, Dengue Virus
gatttagactaccccaaaaacgaaggggactaaaacgtataatcccttctggtgtgttgatgtt

SEQ ID NO: 157 - DNA, 28 bp, Dengue Virus
gtataatcccttctggtgtgttgatgtt

SEQ ID NO: 158 - DNA, 36 bp, Dengue Virus; identical to SEQ ID NO: 14

SEQ ID NO: 159 - DNA, 64 bp, Dengue Virus
gatttagactaccccaaaaacgaaggggactaaaactggtataatcccttctggtgtgttgatg

SEQ ID NO: 160 - DNA, 28 bp, Dengue Virus
tggtataatcccttctggtgtgttgatg

SEQ ID NO: 161 - DNA, 36 bp, Dengue Virus; identical to SEQ ID NO: 14

SEQ ID NO: 162 - DNA, 64 bp, Dengue Virus
gatttagactaccccaaaaacgaaggggactaaaacgctggtataatcccttctggtgtgttga

SEQ ID NO: 163 - DNA, 28 bp, Dengue Virus
gctggtataatcccttctggtgtgttga

SEQ ID NO: 164 - DNA, 36 bp, Dengue Virus; identical to SEQ ID NO: 14

SEQ ID NO: 165 - DNA, 64 bp, Dengue Virus
gatttagactaccccaaaaacgaaggggactaaaacgagctggtataatcccttctggtgtgtt

SEQ ID NO: 166 - DNA, 28 bp, Dengue Virus
gagctggtataatcccttctggtgtgtt

SEQ ID NO: 167 - DNA, 36 bp, Dengue Virus; identical to SEQ ID NO: 14

SEQ ID NO: 168 - DNA, 64 bp, Dengue Virus
gatttagactaccccaaaaacgaaggggactaaaacgagagctggtataatcccttctggtgtg

SEQ ID NO: 169 - DNA, 28 bp, Dengue Virus
gagagctggtataatcccttctggtgtg

SEQ ID NO: 170 - DNA, 36 bp, Dengue Virus; identical to SEQ ID NO: 14

SEQ ID NO: 171 - DNA, 64 bp, Dengue Virus
gatttagactaccccaaaaacgaaggggactaaaacaagagagctggtataatcccttctggtg

SEQ ID NO: 172 - DNA, 28 bp, Dengue Virus
aagagagctggtataatcccttctggtg

SEQ ID NO: 173 - DNA, 36 bp, Dengue Virus; identical to SEQ ID NO: 14

SEQ ID NO: 174 - DNA, 64 bp, Dengue Virus
gatttagactaccccaaaaacgaaggggactaaaaccaaagagagctggtataatcccttctgg

SEQ ID NO: 175 - DNA, 28 bp, Dengue Virus
caaagagagctggtataatcccttctgg

SEQ ID NO: 176 - DNA, 36 bp, Dengue Virus; identical to SEQ ID NO: 14

SEQ ID NO: 177 - DNA, 64 bp, Dengue Virus
gatttagactaccccaaaaacgaaggggactaaaacttcaaagagagctggtataatcccttct

SEQ ID NO: 178 - DNA, 28 bp, Dengue Virus
ttcaaagagagctggtataatcccttct

SEQ ID NO: 179 - DNA, 36 bp, Dengue Virus; identical to SEQ ID NO: 14

SEQ ID NO: 180 - DNA, 64 bp, Dengue Virus
gatttagactaccccaaaaacgaaggggactaaaacggttcaaagagagctggtataatccctt

SEQ ID NO: 181 - DNA, 28 bp, Dengue Virus
ggttcaaagagagctggtataatccctt

SEQ ID NO: 182 - DNA, 36 bp, Dengue Virus; identical to SEQ ID NO: 14

SEQ ID NO: 183 - DNA, 64 bp, Dengue Virus
gatttagactaccccaaaaacgaaggggactaaaacctggttcaaagagagctggtataatccc

SEQ ID NO: 184 - DNA, 28 bp, Dengue Virus
ctggttcaaagagagctggtataatccc

SEQ ID NO: 185 - DNA, 36 bp, Dengue Virus; identical to SEQ ID NO: 14

SEQ ID NO: 186 - DNA, 64 bp, Dengue Virus
gatttagactaccccaaaaacgaaggggactaaaacttctggttcaaagagagctggtataatc

SEQ ID NO: 187 - DNA, 28 bp, Dengue Virus
ttctggttcaaagagagctggtataatc

SEQ ID NO: 188 - DNA, 36 bp, Dengue Virus; identical to SEQ ID NO: 14

SEQ ID NO: 189 - DNA, 64 bp, Dengue Virus
gatttagactaccccaaaaacgaaggggactaaaacctttctggttcaaagagagctggtataa

SEQ ID NO: 190 - DNA, 28 bp, Dengue Virus
ctttctggttcaaagagagctggtataa

SEQ ID NO: 191 - DNA, 36 bp, Dengue Virus; identical to SEQ ID NO: 14

SEQ ID NO: 192 - DNA, 64 bp, Dengue Virus
gatttagactaccccaaaaacgaaggggactaaaacccctttctggttcaaagagagctggtat

SEQ ID NO: 193 - DNA, 28 bp, Dengue Virus
ccctttctggttcaaagagagctggtat

SEQ ID NO: 194 - DNA, 36 bp, Dengue Virus; identical to SEQ ID NO: 14

SEQ ID NO: 195 - DNA, 64 bp, Dengue Virus
gatttagactaccccaaaaacgaaggggactaaaacctccctttctggttcaaagagagctggt

SEQ ID NO: 196 - DNA, 28 bp, Dengue Virus
ctccctttctggttcaaagagagctggt

SEQ ID NO: 197 - DNA, 36 bp, Dengue Virus; identical to SEQ ID NO: 14

SEQ ID NO: 198 - DNA, 64 bp, Dengue Virus
gatttagactaccccaaaaacgaaggggactaaaacttctccctttctggttcaaagagagctg

SEQ ID NO: 199 - DNA, 28 bp, Dengue Virus
ttctccctttctggttcaaagagagctg

SEQ ID NO: 200 - DNA, 36 bp, Dengue Virus; identical to SEQ ID NO: 14

SEQ ID NO: 201 - DNA, 64 bp, Dengue Virus
gatttagactaccccaaaaacgaaggggactaaaacacttctccctttctggttcaaagagagc

SEQ ID NO: 202 - DNA, 28 bp, Dengue Virus
acttctccctttctggttcaaagagagc

SEQ ID NO: 203 - DNA, 36 bp, Dengue Virus; identical to SEQ ID NO: 14

SEQ ID NO: 204 - DNA, 64 bp, Dengue Virus
gatttagactaccccaaaaacgaaggggactaaaactgacttctccctttctggttcaaagaga

SEQ ID NO: 205 - DNA, 28 bp, Dengue Virus
tgacttctccctttctggttcaaagaga

SEQ ID NO: 206 - DNA, 36 bp, Dengue Virus; identical to SEQ ID NO: 14

SEQ ID NO: 207 - DNA, 64 bp, Dengue Virus
gatttagactaccccaaaaacgaaggggactaaaacctgacttctccctttctggttcaaagag

SEQ ID NO: 208 - DNA, 28 bp, Dengue Virus
ctgacttctccctttctggttcaaagag

SEQ ID NO: 209 - DNA, 36 bp, Dengue Virus; identical to SEQ ID NO: 14

SEQ ID NO: 210 - DNA, 64 bp, Dengue Virus
gatttagactaccccaaaaacgaaggggactaaaacgctgacttctccctttctggttcaaaga

SEQ ID NO: 211 - DNA, 28 bp, Dengue Virus
gctgacttctccctttctggttcaaaga

SEQ ID NO: 212 - DNA, 36 bp, Dengue Virus; identical to SEQ ID NO: 14

SEQ ID NO: 213 - DNA, 64 bp, Dengue Virus
gatttagactaccccaaaaacgaaggggactaaaacggctgacttctccctttctggttcaaag

SEQ ID NO: 214 - DNA, 28 bp, Dengue Virus
ggctgacttctccctttctggttcaaag

SEQ ID NO: 215 - DNA, 36 bp, Dengue Virus; identical to SEQ ID NO: 14

SEQ ID NO: 216 - DNA, 64 bp, Dengue Virus
gatttagactaccccaaaaacgaaggggactaaaaccggctgacttctccctttctggttcaaa

SEQ ID NO: 217 - DNA, 28 bp, Dengue Virus
cggctgacttctccctttctggttcaaa

SEQ ID NO: 218 - DNA, 36 bp, Dengue Virus; identical to SEQ ID NO: 14

SEQ ID NO: 219 - DNA, 64 bp, Dengue Virus
gatttagactaccccaaaaacgaaggggactaaaacgcggctgacttctccctttctggttcaa

SEQ ID NO: 220 - DNA, 28 bp, Dengue Virus
gcggctgacttctccctttctggttcaa

SEQ ID NO: 221 - DNA, 36 bp, Dengue Virus; identical to SEQ ID NO: 14

SEQ ID NO: 222 - DNA, 64 bp, Dengue Virus
gatttagactaccccaaaaacgaaggggactaaaacggcggctgacttctccctttctggttca

SEQ ID NO: 223 - DNA, 28 bp, Dengue Virus
ggcggctgacttctccctttctggttca

SEQ ID NO: 224 - DNA, 36 bp, Dengue Virus; identical to SEQ ID NO: 14

SEQ ID NO: 225 - DNA, 64 bp, Dengue Virus
gatttagactaccccaaaaacgaaggggactaaaactggcggctgacttctccctttctggttc

SEQ ID NO: 226 - DNA, 28 bp, Dengue Virus
tggcggctgacttctccctttctggttc

SEQ ID NO: 227 - DNA, 36 bp, Dengue Virus; identical to SEQ ID NO: 14

SEQ ID NO: 228 - DNA, 64 bp, Dengue Virus
gatttagactaccccaaaaacgaaggggactaaaacatggcggctgacttctccctttctggtt

SEQ ID NO: 229 - DNA, 28 bp, Dengue Virus
atggcggctgacttctccctttctggtt

SEQ ID NO: 230 - DNA, 36 bp, Dengue Virus; identical to SEQ ID NO: 14

SEQ ID NO: 231 - DNA, 64 bp, Dengue Virus
gatttagactaccccaaaaacgaaggggactaaaactatggcggctgacttctccctttctggt

SEQ ID NO: 232 - DNA, 28 bp, Dengue Virus
tatggcggctgacttctccctttctggt

SEQ ID NO: 233 - DNA, 36 bp, Dengue Virus; identical to SEQ ID NO: 14

SEQ ID NO: 234 - DNA, 64 bp, Dengue Virus
gatttagactaccccaaaaacgaaggggactaaaacctatggcggctgacttctccctttctgg

SEQ ID NO: 235 - DNA, 28 bp, Dengue Virus
ctatggcggctgacttctccctttctgg

SEQ ID NO: 236 - DNA, 36 bp, Dengue Virus; identical to SEQ ID NO: 14

SEQ ID NO: 237 - DNA, 64 bp, Dengue Virus
gatttagactaccccaaaaacgaaggggactaaaactctatggcggctgacttctccctttctg

SEQ ID NO: 238 - DNA, 28 bp, Dengue Virus
tctatggcggctgacttctccctttctg

SEQ ID NO: 239 - DNA, 36 bp, Dengue Virus; identical to SEQ ID NO: 14

SEQ ID NO: 240 - DNA, 64 bp, Dengue Virus
gatttagactaccccaaaaacgaaggggactaaaacgtctatggcggctgacttctccctttct

SEQ ID NO: 241 - DNA, 28 bp, Dengue Virus
gtctatggcggctgacttctccctttct

SEQ ID NO: 242 - DNA, 36 bp, Dengue Virus; identical to SEQ ID NO: 14

SEQ ID NO: 243 - DNA, 64 bp, Dengue Virus
gatttagactaccccaaaaacgaaggggactaaaaccgtctatggcggctgacttctccctttc

SEQ ID NO: 244 - DNA, 28 bp, Dengue Virus
cgtctatggcggctgacttctccctttc

SEQ ID NO: 245 - DNA, 36 bp, Dengue Virus; identical to SEQ ID NO: 14

SEQ ID NO: 246 - DNA, 64 bp, Dengue Virus
gatttagactaccccaaaaacgaaggggactaaaacccgtctatggcggctgacttctcccttt

SEQ ID NO: 247 - DNA, 28 bp, Dengue Virus
ccgtctatggcggctgacttctcccttt

SEQ ID NO: 248 - DNA, 36 bp, Dengue Virus; identical to SEQ ID NO: 14

SEQ ID NO: 249 - DNA, 64 bp, Dengue Virus
gatttagactaccccaaaaacgaaggggactaaaacaccgtctatggcggctgacttctccctt

SEQ ID NO: 250 - DNA, 28 bp, Dengue Virus
accgtctatggcggctgacttctccctt

SEQ ID NO: 251 - DNA, 36 bp, Dengue Virus; identical to SEQ ID NO: 14

SEQ ID NO: 252 - DNA, 64 bp, Dengue Virus
gatttagactaccccaaaaacgaaggggactaaaaccaccgtctatggcggctgacttctccct

SEQ ID NO: 253 - DNA, 28 bp, Dengue Virus
caccgtctatggcggctgacttctccct

SEQ ID NO: 254 - DNA, 36 bp, Dengue Virus; identical to SEQ ID NO: 14

SEQ ID NO: 255 - DNA, 64 bp, Dengue Virus
gatttagactaccccaaaaacgaaggggactaaaactcaccgtctatggcggctgacttctccc

SEQ ID NO: 256 - DNA, 28 bp, Dengue Virus
tcaccgtctatggcggctgacttctccc

SEQ ID NO: 257 - DNA, 36 bp, Dengue Virus; identical to SEQ ID NO: 14

SEQ ID NO: 258 - DNA, 64 bp, Dengue Virus
gatttagactaccccaaaaacgaaggggactaaaacttcaccgtctatggcggctgacttctcc

SEQ ID NO: 259 - DNA, 28 bp, Dengue Virus
ttcaccgtctatggcggctgacttctcc

SEQ ID NO: 260 - DNA, 36 bp, Dengue Virus; identical to SEQ ID NO: 14

SEQ ID NO: 261 - DNA, 64 bp, Dengue Virus
gatttagactaccccaaaaacgaaggggactaaaacattcaccgtctatggcggctgacttctc

SEQ ID NO: 262 - DNA, 28 bp, Dengue Virus
attcaccgtctatggcggctgacttctc

SEQ ID NO: 263 - DNA, 36 bp, Dengue Virus; identical to SEQ ID NO: 14

SEQ ID NO: 264 - DNA, 64 bp, Dengue Virus
gatttagactaccccaaaaacgaaggggactaaaactattcaccgtctatggcggctgacttct

SEQ ID NO: 265 - DNA, 28 bp, Dengue Virus
tattcaccgtctatggcggctgacttct

SEQ ID NO: 266 - DNA, 36 bp, Dengue Virus; identical to SEQ ID NO: 14

SEQ ID NO: 267 - DNA, 64 bp, Dengue Virus
gatttagactaccccaaaaacgaaggggactaaaacgtattcaccgtctatggcggctgacttc

SEQ ID NO: 268 - DNA, 28 bp, Dengue Virus
gtattcaccgtctatggcggctgacttc

SEQ ID NO: 269 - DNA, 36 bp, Dengue Virus; identical to SEQ ID NO: 14

SEQ ID NO: 270 - DNA, 64 bp, Dengue Virus
gatttagactaccccaaaaacgaaggggactaaaacggtattcaccgtctatggcggctgactt

SEQ ID NO: 271 - DNA, 28 bp, Dengue Virus
ggtattcaccgtctatggcggctgactt

SEQ ID NO: 272 - DNA, 36 bp, Dengue Virus; identical to SEQ ID NO: 14

SEQ ID NO: 273 - DNA, 64 bp, Dengue Virus
gatttagactaccccaaaaacgaaggggactaaaaccggtattcaccgtctatggcggctgact

SEQ ID NO: 274 - DNA, 28 bp, Dengue Virus
cggtattcaccgtctatggcggctgact

SEQ ID NO: 275 - DNA, 36 bp, Dengue Virus; identical to SEQ ID NO: 14

SEQ ID NO: 276 - DNA, 64 bp, Dengue Virus
gatttagactaccccaaaaacgaaggggactaaaacgcggtattcaccgtctatggcggctgac

SEQ ID NO: 277 - DNA, 28 bp, Dengue Virus
gcggtattcaccgtctatggcggctgac

SEQ ID NO: 278 - DNA, 36 bp, Dengue Virus; identical to SEQ ID NO: 14

SEQ ID NO: 279 - DNA, 64 bp, Dengue Virus
gatttagactaccccaaaaacgaaggggactaaaacggcggtattcaccgtctatggcggctga

SEQ ID NO: 280 - DNA, 28 bp, Dengue Virus
ggcggtattcaccgtctatggcggctga

SEQ ID NO: 281 - DNA, 36 bp, Dengue Virus; identical to SEQ ID NO: 14

SEQ ID NO: 282 - DNA, 64 bp, Dengue Virus
gatttagactaccccaaaaacgaaggggactaaaacaggcggtattcaccgtctatggcggctg

SEQ ID NO: 283 - DNA, 28 bp, Dengue Virus
aggcggtattcaccgtctatggcggctg

SEQ ID NO: 284 - DNA, 36 bp, Dengue Virus; identical to SEQ ID NO: 14

SEQ ID NO: 285 - DNA, 64 bp, Dengue Virus
gatttagactaccccaaaaacgaaggggactaaaaccaggcggtattcaccgtctatggcggct

SEQ ID NO: 286 - DNA, 28 bp, Dengue Virus
caggcggtattcaccgtctatggcggct

SEQ ID NO: 287 - DNA, 36 bp, Dengue Virus; identical to SEQ ID NO: 14

SEQ ID NO: 288 - DNA, 64 bp, Dengue Virus
gatttagactaccccaaaaacgaaggggactaaaactcaggcggtattcaccgtctatggcggc

SEQ ID NO: 289 - DNA, 28 bp, Dengue Virus
tcaggcggtattcaccgtctatggcggc

SEQ ID NO: 290 - DNA, 36 bp, Dengue Virus; identical to SEQ ID NO: 14

SEQ ID NO: 291 - DNA, 64 bp, Dengue Virus
gatttagactaccccaaaaacgaaggggactaaaacttcaggcggtattcaccgtctatggcgg

SEQ ID NO: 292 - DNA, 28 bp, Dengue Virus
ttcaggcggtattcaccgtctatggcgg

SEQ ID NO: 293 - DNA, 36 bp, Dengue Virus; identical to SEQ ID NO: 14

SEQ ID NO: 294 - DNA, 64 bp, Dengue Virus
gatttagactaccccaaaaacgaaggggactaaaaccttcaggcggtattcaccgtctatggcg

SEQ ID NO: 295 - DNA, 28 bp, Dengue Virus
cttcaggcggtattcaccgtctatggcg

SEQ ID NO: 296 - DNA, 36 bp, Dengue Virus; identical to SEQ ID NO: 14

SEQ ID NO: 297 - DNA, 64 bp, Dengue Virus
gatttagactaccccaaaaacgaaggggactaaaacccttcaggcggtattcaccgtctatggc

SEQ ID NO: 298 - DNA, 28 bp, Dengue Virus
ccttcaggcggtattcaccgtctatggc

SEQ ID NO: 299 - DNA, 36 bp, Dengue Virus; identical to SEQ ID NO: 14

SEQ ID NO: 300 - DNA, 64 bp, Ebola Virus
gatttagactaccccaaaaacgaaggggactaaaacctgtgaaagacaactcttcactgcgaat

SEQ ID NO: 301 - DNA, 28 bp, Ebola Virus
ctgtgaaagacaactcttcactgcgaat

SEQ ID NO: 302 - DNA, 36 bp, Ebola Virus; identical to SEQ ID NO: 14

SEQ ID NO: 303 - DNA, 64 bp, Ebola Virus
gatttagactaccccaaaaacgaaggggactaaaacgatacaactgtgaaagacaactcttcac

SEQ ID NO: 304 - DNA, 28 bp, Ebola Virus
gatacaactgtgaaagacaactcttcac

SEQ ID NO: 305 - DNA, 36 bp, Ebola Virus; identical to SEQ ID NO: 14

SEQ ID NO: 306 - DNA, 64 bp, Ebola Virus
gatttagactaccccaaaaacgaaggggactaaaactgatacaactgtgaaagacaactcttca

SEQ ID NO: 307 - DNA, 28 bp, Ebola Virus
tgatacaactgtgaaagacaactcttca

SEQ ID NO: 308 - DNA, 36 bp, Ebola Virus; identical to SEQ ID NO: 14

SEQ ID NO: 309 - DNA, 64 bp, Ebola Virus
gatttagactaccccaaaaacgaaggggactaaaactttgatacaactgtgaaagacaactctt

SEQ ID NO: 310 - DNA, 28 bp, Ebola Virus
tttgatacaactgtgaaagacaactctt

SEQ ID NO: 311 - DNA, 36 bp, Ebola Virus; identical to SEQ ID NO: 14

SEQ ID NO: 312 - DNA, 64 bp, Ebola Virus
gatttagactaccccaaaaacgaaggggactaaaactccgtttgatacaactgtgaaagacaac

SEQ ID NO: 313 - DNA, 28 bp, Ebola Virus
tccgtttgatacaactgtgaaagacaac

SEQ ID NO: 314 - DNA, 36 bp, Ebola Virus; identical to SEQ ID NO: 14

SEQ ID NO: 315 - DNA, 64 bp, Ebola Virus
gatttagactaccccaaaaacgaaggggactaaaacggctccgtttgatacaactgtgaaagac

SEQ ID NO: 316 - DNA, 28 bp, Ebola Virus
ggctccgtttgatacaactgtgaaagac

SEQ ID NO: 317 - DNA, 36 bp, Ebola Virus; identical to SEQ ID NO: 14

SEQ ID NO: 318 - DNA, 64 bp, Ebola Virus
gatttagactaccccaaaaacgaaggggactaaaacccactgatgtttttggctccgtttgata

SEQ ID NO: 319 - DNA, 28 bp, Ebola Virus
ccactgatgtttttggctccgtttgata

SEQ ID NO: 320 - DNA, 36 bp, Ebola Virus; identical to SEQ ID NO: 14

SEQ ID NO: 321 - DNA, 64 bp, Ebola Virus
gatttagactaccccaaaaacgaaggggactaaaacaccactgatgtttttggctccgtttgat

SEQ ID NO: 322 - DNA, 28 bp, Ebola Virus
accactgatgtttttggctccgtttgat

SEQ ID NO: 323 - DNA, 36 bp, Ebola Virus; identical to SEQ ID NO: 14

SEQ ID NO: 324 - DNA, 64 bp, Ebola Virus
gatttagactaccccaaaaacgaaggggactaaaacgaccactgatgtttttggctccgtttga

SEQ ID NO: 325 - DNA, 28 bp, Ebola Virus
gaccactgatgtttttggctccgtttga

SEQ ID NO: 326 - DNA, 36 bp, Ebola Virus; identical to SEQ ID NO: 14

SEQ ID NO: 327 - DNA, 64 bp, Ebola Virus
gatttagactaccccaaaaacgaaggggactaaaacctgaccactgatgtttttggctccgttt

SEQ ID NO: 328 - DNA, 28 bp, Ebola Virus
ctgaccactgatgtttttggctccgttt

SEQ ID NO: 329 - DNA, 36 bp, Ebola Virus; identical to SEQ ID NO: 14

SEQ ID NO: 330 - DNA, 64 bp, Ebola Virus
gatttagactaccccaaaaacgaaggggactaaaacctctgaccactgatgtttttggctccgt

SEQ ID NO: 331 - DNA, 28 bp, Ebola Virus
ctctgaccactgatgtttttggctccgt

SEQ ID NO: 332 - DNA, 36 bp, Ebola Virus; identical to SEQ ID NO: 14

SEQ ID NO: 333 - DNA, 64 bp, Ebola Virus
gatttagactaccccaaaaacgaaggggactaaaaccgccggactctgaccactgatgtttttg

SEQ ID NO: 334 - DNA, 28 bp, Ebola Virus
cgccggactctgaccactgatgtttttg

SEQ ID NO: 335 - DNA, 36 bp, Ebola Virus; identical to SEQ ID NO: 14

SEQ ID NO: 336 - DNA, 64 bp, Ebola Virus
gatttagactaccccaaaaacgaaggggactaaaaccgcgccggactctgaccactgatgtttt

SEQ ID NO: 337 - DNA, 28 bp, Ebola Virus
cgcgccggactctgaccactgatgtttt

SEQ ID NO: 338 - DNA, 36 bp, Ebola Virus; identical to SEQ ID NO: 14

SEQ ID NO: 339 - DNA, 64 bp, Ebola Virus
gatttagactaccccaaaaacgaaggggactaaaacttcgcgccggactctgaccactgatgtt

SEQ ID NO: 340 - DNA, 28 bp, Ebola Virus
ttcgcgccggactctgaccactgatgtt

SEQ ID NO: 341 - DNA, 36 bp, Ebola Virus; identical to SEQ ID NO: 14

SEQ ID NO: 342 - DNA, 64 bp, Ebola Virus
gatttagactaccccaaaaacgaaggggactaaaacgttcgcgccggactctgaccactgatgt

SEQ ID NO: 343 - DNA, 28 bp, Ebola Virus
gttcgcgccggactctgaccactgatgt

SEQ ID NO: 344 - DNA, 36 bp, Ebola Virus; identical to SEQ ID NO: 14

SEQ ID NO: 345 - DNA, 64 bp, Ebola Virus
gatttagactaccccaaaaacgaaggggactaaaacagttcgcgccggactctgaccactgatg

SEQ ID NO: 346 - DNA, 28 bp, Ebola Virus
agttcgcgccggactctgaccactgatg

SEQ ID NO: 347 - DNA, 36 bp, Ebola Virus; identical to SEQ ID NO: 14

SEQ ID NO: 348 - DNA, 64 bp, Ebola Virus
gatttagactaccccaaaaacgaaggggactaaaacaagttcgcgccggactctgaccactgat

SEQ ID NO: 349 - DNA, 28 bp, Ebola Virus
aagttcgcgccggactctgaccactgat

SEQ ID NO: 350 - DNA, 36 bp, Ebola Virus; identical to SEQ ID NO: 14

SEQ ID NO: 351 - DNA, 64 bp, Ebola Virus
gatttagactaccccaaaaacgaaggggactaaaacagaagttcgcgccggactctgaccactg

SEQ ID NO: 352 - DNA, 28 bp, Ebola Virus
agaagttcgcgccggactctgaccactg

SEQ ID NO: 353 - DNA, 36 bp, Ebola Virus; identical to SEQ ID NO: 14

SEQ ID NO: 354 - DNA, 64 bp, Ebola Virus
gatttagactaccccaaaaacgaaggggactaaaacggtcggaagaagttcgcgccggactctg

SEQ ID NO: 355 - DNA, 28 bp, Ebola Virus
ggtcggaagaagttcgcgccggactctg

SEQ ID NO: 356 - DNA, 36 bp, Ebola Virus; identical to SEQ ID NO: 14

SEQ ID NO: 357 - DNA, 64 bp, Ebola Virus
gatttagactaccccaaaaacgaaggggactaaaacctgggtcggaagaagttcgcgccggact

SEQ ID NO: 358 - DNA, 28 bp, Ebola Virus
ctgggtcggaagaagttcgcgccggact

SEQ ID NO: 359 - DNA, 36 bp, Ebola Virus; identical to SEQ ID NO: 14

SEQ ID NO: 360 - DNA, 64 bp, Ebola Virus
gatttagactaccccaaaaacgaaggggactaaaaccctgggtcggaagaagttcgcgccggac

SEQ ID NO: 361 - DNA, 28 bp, Ebola Virus
cctgggtcggaagaagttcgcgccggac

SEQ ID NO: 362 - DNA, 36 bp, Ebola Virus; identical to SEQ ID NO: 14

SEQ ID NO: 363 - DNA, 64 bp, Ebola Virus
gatttagactaccccaaaaacgaaggggactaaaacccctgggtcggaagaagttcgcgccgga

SEQ ID NO: 364 - DNA, 28 bp, Ebola Virus
ccctgggtcggaagaagttcgcgccgga

SEQ ID NO: 365 - DNA, 36 bp, Ebola Virus; identical to SEQ ID NO: 14

SEQ ID NO: 366 - DNA, 64 bp, Ebola Virus
gatttagactaccccaaaaacgaaggggactaaaactccctgggtcggaagaagttcgcgccgg

SEQ ID NO: 367 - DNA, 28 bp, Ebola Virus
tccctgggtcggaagaagttcgcgccgg

SEQ ID NO: 368 - DNA, 36 bp, Ebola Virus; identical to SEQ ID NO: 14

SEQ ID NO: 369 - DNA, 64 bp, Ebola Virus
gatttagactaccccaaaaacgaaggggactaaaacggtccctgggtcggaagaagttcgcgcc

SEQ ID NO: 370 - DNA, 28 bp, Ebola Virus
ggtccctgggtcggaagaagttcgcgcc

SEQ ID NO: 371 - DNA, 36 bp, Ebola Virus; identical to SEQ ID NO: 14

SEQ ID NO: 372 - DNA, 64 bp, Ebola Virus
gatttagactaccccaaaaacgaaggggactaaaacgttggtccctgggtcggaagaagttcgc

SEQ ID NO: 373 - DNA, 28 bp, Ebola Virus
gttggtccctgggtcggaagaagttcgc

SEQ ID NO: 374 - DNA, 36 bp, Ebola Virus; identical to SEQ ID NO: 14

SEQ ID NO: 375 - DNA, 64 bp, Ebola Virus
gatttagactaccccaaaaacgaaggggactaaaacagttgttgtgttggtccctgggtcggaa

SEQ ID NO: 376 - DNA, 28 bp, Ebola Virus
agttgttgtgttggtccctgggtcggaa

SEQ ID NO: 377 - DNA, 36 bp, Ebola Virus; identical to SEQ ID NO: 14

SEQ ID NO: 378 - DNA, 64 bp, Ebola Virus
gatttagactaccccaaaaacgaaggggactaaaactcagttgttgtgttggtccctgggtcgg

SEQ ID NO: 379 - DNA, 28 bp, Ebola Virus
tcagttgttgtgttggtccctgggtcgg

SEQ ID NO: 380 - DNA, 36 bp, Ebola Virus; identical to SEQ ID NO: 14

SEQ ID NO: 381 - DNA, 64 bp, Ebola Virus
gatttagactaccccaaaaacgaaggggactaaaacttcagttgttgtgttggtccctgggtcg

SEQ ID NO: 382 - DNA, 28 bp, Ebola Virus
ttcagttgttgtgttggtccctgggtcg

SEQ ID NO: 383 - DNA, 36 bp, Ebola Virus; identical to SEQ ID NO: 14

SEQ ID NO: 384 - DNA, 64 bp, Ebola Virus
gatttagactaccccaaaaacgaaggggactaaaaccttcagttgttgtgttggtccctgggtc

SEQ ID NO: 385 - DNA, 28 bp, Ebola Virus
cttcagttgttgtgttggtccctgggtc

SEQ ID NO: 386 - DNA, 36 bp, Ebola Virus; identical to SEQ ID NO: 14

SEQ ID NO: 387 - DNA, 64 bp, Ebola Virus
gatttagactaccccaaaaacgaaggggactaaaactcttcagttgttgtgttggtccctgggt

SEQ ID NO: 388 - DNA, 28 bp, Ebola Virus
tcttcagttgttgtgttggtccctgggt

SEQ ID NO: 389 - DNA, 36 bp, Ebola Virus; identical to SEQ ID NO: 14

SEQ ID NO: 390 - DNA, 64 bp, Ebola Virus
gatttagactaccccaaaaacgaaggggactaaaactggtcttcagttgttgtgttggtccctg

SEQ ID NO: 391 - DNA, 28 bp, Ebola Virus
tggtcttcagttgttgtgttggtccctg

SEQ ID NO: 392 - DNA, 36 bp, Ebola Virus; identical to SEQ ID NO: 14

SEQ ID NO: 393 - DNA, 64 bp, Ebola Virus
gatttagactaccccaaaaacgaaggggactaaaacattttgtggtcttcagttgttgtgttgg

SEQ ID NO: 394 - DNA, 28 bp, Ebola Virus
attttgtggtcttcagttgttgtgttgg

SEQ ID NO: 395 - DNA, 36 bp, Ebola Virus; identical to SEQ ID NO: 14

SEQ ID NO: 396 - DNA, 64 bp, Ebola Virus
gatttagactaccccaaaaacgaaggggactaaaacgccatgattttgtggtcttcagttgttg

SEQ ID NO: 397 - DNA, 28 bp, Ebola Virus
gccatgattttgtggtcttcagttgttg

SEQ ID NO: 398 - DNA, 36 bp, Ebola Virus; identical to SEQ ID NO: 14

SEQ ID NO: 399 - DNA, 64 bp, Ebola Virus
gatttagactaccccaaaaacgaaggggactaaaacaagccatgattttgtggtcttcagttgt

SEQ ID NO: 400 - DNA, 28 bp, Ebola Virus
aagccatgattttgtggtcttcagttgt

SEQ ID NO: 401 - DNA, 36 bp, Ebola Virus; identical to SEQ ID NO: 14

SEQ ID NO: 402 - DNA, 64 bp, Ebola Virus
gatttagactaccccaaaaacgaaggggactaaaacctgaagccatgattttgtggtcttcagt

SEQ ID NO: 403 - DNA, 28 bp, Ebola Virus
ctgaagccatgattttgtggtcttcagt

SEQ ID NO: 404 - DNA, 36 bp, Ebola Virus; identical to SEQ ID NO: 14

SEQ ID NO: 405 - DNA, 64 bp, Ebola Virus
gatttagactaccccaaaaacgaaggggactaaaacgaattttctgaagccatgattttgtggt

SEQ ID NO: 406 - DNA, 28 bp, Ebola Virus
gaattttctgaagccatgattttgtggt

SEQ ID NO: 407 - DNA, 36 bp, Ebola Virus; identical to SEQ ID NO: 14

SEQ ID NO: 408 - DNA, 64 bp, Ebola Virus
gatttagactaccccaaaaacgaaggggactaaaacagaggaattttctgaagccatgattttg

SEQ ID NO: 409 - DNA, 28 bp, Ebola Virus
agaggaattttctgaagccatgattttg

SEQ ID NO: 410 - DNA, 36 bp, Ebola Virus; identical to SEQ ID NO: 14

SEQ ID NO: 411 - DNA, 64 bp, Ebola Virus
gatttagactaccccaaaaacgaaggggactaaaaccagaggaattttctgaagccatgatttt

SEQ ID NO: 412 - DNA, 28 bp, Ebola Virus
cagaggaattttctgaagccatgatttt

SEQ ID NO: 413 - DNA, 36 bp, Ebola Virus; identical to SEQ ID NO: 14

SEQ ID NO: 414 - DNA, 64 bp, Ebola Virus
gatttagactaccccaaaaacgaaggggactaaaaccattgcagaggaattttctgaagccatg

SEQ ID NO: 415 - DNA, 28 bp, Ebola Virus
cattgcagaggaattttctgaagccatg

SEQ ID NO: 416 - DNA, 36 bp, Ebola Virus; identical to SEQ ID NO: 14

SEQ ID NO: 417 - DNA, 64 bp, Ebola Virus
gatttagactaccccaaaaacgaaggggactaaaaccacttgaaccattgcagaggaattttct

SEQ ID NO: 418 - DNA, 28 bp, Ebola Virus
cacttgaaccattgcagaggaattttct

SEQ ID NO: 419 - DNA, 36 bp, Ebola Virus; identical to SEQ ID NO: 14

SEQ ID NO: 420 - DNA, 64 bp, Artificial Sequence
  synthetic
gatttagactaccccaaaaacgaaggggactaaaacccccgggtaccgagctcgaattcactgg

SEQ ID NO: 421 - DNA, 28 bp, Artificial Sequence
  synthetic
ccccgggtaccgagctcgaattcactgg

SEQ ID NO: 422 - DNA, 36 bp, Artificial Sequence; identical to SEQ ID NO: 14
  synthetic

SEQ ID NO: 423 - DNA, 64 bp, Artificial Sequence
  synthetic
gatttagactaccccaaaaacgaaggggactaaaactccccgggtaccgagctcgaattcactg

SEQ ID NO: 424 - DNA, 28 bp, Artificial Sequence
  synthetic
tccccgggtaccgagctcgaattcactg

SEQ ID NO: 425 - DNA, 36 bp, Artificial Sequence; identical to SEQ ID NO: 14
  synthetic

SEQ ID NO: 426 - DNA, 64 bp, Artificial Sequence
  synthetic
gatttagactaccccaaaaacgaaggggactaaaacatccccgggtaccgagctcgaattcact

SEQ ID NO: 427 - DNA, 28 bp, Artificial Sequence
  synthetic
atccccgggtaccgagctcgaattcact

SEQ ID NO: 428 - DNA, 36 bp, Artificial Sequence; identical to SEQ ID NO: 14
  synthetic

SEQ ID NO: 429 - DNA, 64 bp, Artificial Sequence
  synthetic
gatttagactaccccaaaaacgaaggggactaaaacaggatccccgggtaccgagctcgaattc

SEQ ID NO: 430 - DNA, 28 bp, Artificial Sequence
  synthetic
aggatccccgggtaccgagctcgaattc

SEQ ID NO: 431 - DNA, 36 bp, Artificial Sequence; identical to SEQ ID NO: 14
  synthetic

SEQ ID NO: 432 - DNA, 64 bp, Artificial Sequence
  synthetic
gatttagactaccccaaaaacgaaggggactaaaacagaggatccccgggtaccgagctcgaat

SEQ ID NO: 433 - DNA, 28 bp, Artificial Sequence
  synthetic
agaggatccccgggtaccgagctcgaat

SEQ ID NO: 434 - DNA, 36 bp, Artificial Sequence; identical to SEQ ID NO: 14
  synthetic

SEQ ID NO: 435 - DNA, 64 bp, Artificial Sequence
  synthetic
gatttagactaccccaaaaacgaaggggactaaaactctagaggatccccgggtaccgagctcg

SEQ ID NO: 436 - DNA, 28 bp, Artificial Sequence
  synthetic
tctagaggatccccgggtaccgagctcg

SEQ ID NO: 437 - DNA, 36 bp, Artificial Sequence; identical to SEQ ID NO: 14
  synthetic

SEQ ID NO: 438 - DNA, 64 bp, Artificial Sequence
  synthetic
gatttagactaccccaaaaacgaaggggactaaaacttctagaggatccccgggtaccgagctc

SEQ ID NO: 439 - DNA, 28 bp, Artificial Sequence
  synthetic
ttctagaggatccccgggtaccgagctc

SEQ ID NO: 440 - DNA, 36 bp, Artificial Sequence; identical to SEQ ID NO: 14
  synthetic

SEQ ID NO: 441 - DNA, 64 bp, Artificial Sequence
  synthetic
gatttagactaccccaaaaacgaaggggactaaaacatttctagaggatccccgggtaccgagc

SEQ ID NO: 442 - DNA, 28 bp, Artificial Sequence
  synthetic
atttctagaggatccccgggtaccgagc

SEQ ID NO: 443 - DNA, 36 bp, Artificial Sequence; identical to SEQ ID NO: 14
  synthetic

SEQ ID NO: 444 - DNA, 64 bp, Artificial Sequence
  synthetic
gatttagactaccccaaaaacgaaggggactaaaactatttctagaggatccccgggtaccgag

SEQ ID NO: 445 - DNA, 28 bp, Artificial Sequence
  synthetic
tatttctagaggatccccgggtaccgag

SEQ ID NO: 446 - DNA, 36 bp, Artificial Sequence; identical to SEQ ID NO: 14
  synthetic

SEQ ID NO: 447 - DNA, 64 bp, Artificial Sequence
  synthetic
gatttagactaccccaaaaacgaaggggactaaaacccatatttctagaggatccccgggtacc

SEQ ID NO: 448 - DNA, 28 bp, Artificial Sequence
  synthetic
ccatatttctagaggatccccgggtacc

SEQ ID NO: 449 - DNA, 36 bp, Artificial Sequence; identical to SEQ ID NO: 14
  synthetic

SEQ ID NO: 450 - DNA, 64 bp, Artificial Sequence
  synthetic
gatttagactaccccaaaaacgaaggggactaaaactccatatttctagaggatccccgggtac

SEQ ID NO: 451 - DNA, 28 bp, Artificial Sequence
  synthetic
tccatatttctagaggatccccgggtac

SEQ ID NO: 452 - DNA, 36 bp, Artificial Sequence; identical to SEQ ID NO: 14
  synthetic

SEQ ID NO: 453 - DNA, 64 bp, Artificial Sequence
  synthetic
gatttagactaccccaaaaacgaaggggactaaaacatccatatttctagaggatccccgggta

SEQ ID NO: 454 - DNA, 28 bp, Artificial Sequence
  synthetic
atccatatttctagaggatccccgggta

SEQ ID NO: 455 - DNA, 36 bp, Artificial Sequence; identical to SEQ ID NO: 14
  synthetic

SEQ ID NO: 456 - DNA, 64 bp, Artificial Sequence
  synthetic
gatttagactaccccaaaaacgaaggggactaaaactaatccatatttctagaggatccccggg

SEQ ID NO: 457 - DNA, 28 bp, Artificial Sequence
  synthetic
taatccatatttctagaggatccccggg

SEQ ID NO: 458 - DNA, 36 bp, Artificial Sequence; identical to SEQ ID NO: 14
  synthetic

SEQ ID NO: 459 - DNA, 64 bp, Artificial Sequence
  synthetic
gatttagactaccccaaaaacgaaggggactaaaacgtaatccatatttctagaggatccccgg

SEQ ID NO: 460 - DNA, 28 bp, Artificial Sequence
  synthetic
gtaatccatatttctagaggatccccgg

SEQ ID NO: 461 - DNA, 36 bp, Artificial Sequence; identical to SEQ ID NO: 14
  synthetic

SEQ ID NO: 462 - DNA, 64 bp, Artificial Sequence
  synthetic
gatttagactaccccaaaaacgaaggggactaaaactaccaagtaatccatatttctagaggat

SEQ ID NO: 463 - DNA, 28 bp, Artificial Sequence
  synthetic
taccaagtaatccatatttctagaggat

SEQ ID NO: 464 - DNA, 36 bp, Artificial Sequence; identical to SEQ ID NO: 14
  synthetic

SEQ ID NO: 465 - DNA, 64 bp, Artificial Sequence
  synthetic
gatttagactaccccaaaaacgaaggggactaaaactctaccaagtaatccatatttctagagg

SEQ ID NO: 466 - DNA, 28 bp, Artificial Sequence
  synthetic
tctaccaagtaatccatatttctagagg

SEQ ID NO: 467 - DNA, 36 bp, Artificial Sequence; identical to SEQ ID NO: 14
  synthetic

SEQ ID NO: 468 - DNA, 64 bp, Artificial Sequence
  synthetic
gatttagactaccccaaaaacgaaggggactaaaacgttctaccaagtaatccatatttctaga

SEQ ID NO: 469 - DNA, 28 bp, Artificial Sequence
  synthetic
gttctaccaagtaatccatatttctaga

SEQ ID NO: 470 - DNA, 36 bp, Artificial Sequence; identical to SEQ ID NO: 14
  synthetic

SEQ ID NO: 471 - DNA, 64 bp, Artificial Sequence
  synthetic
gatttagactaccccaaaaacgaaggggactaaaacgctgttctaccaagtaatccatatttct

SEQ ID NO: 472 - DNA, 28 bp, Artificial Sequence
  synthetic
gctgttctaccaagtaatccatatttct

SEQ ID NO: 473 - DNA, 36 bp, Artificial Sequence; identical to SEQ ID NO: 14
  synthetic

SEQ ID NO: 474 - DNA, 64 bp, Artificial Sequence
  synthetic
gatttagactaccccaaaaacgaaggggactaaaacattgctgttctaccaagtaatccatatt

SEQ ID NO: 475 - DNA, 28 bp, Artificial Sequence
  synthetic
attgctgttctaccaagtaatccatatt

SEQ ID NO: 476 - DNA, 36 bp, Artificial Sequence; identical to SEQ ID NO: 14
  synthetic

SEQ ID NO: 477 - DNA, 64 bp, Artificial Sequence
  synthetic
gatttagactaccccaaaaacgaaggggactaaaactagattgctgttctaccaagtaatccat

SEQ ID NO: 478 - DNA, 28 bp, Artificial Sequence
  synthetic
tagattgctgttctaccaagtaatccat

SEQ ID NO: 479 - DNA, 36 bp, Artificial Sequence; identical to SEQ ID NO: 14
  synthetic

SEQ ID NO: 480 - DNA, 64 bp, Artificial Sequence
  synthetic
gatttagactaccccaaaaacgaaggggactaaaacgtagattgctgttctaccaagtaatcca

SEQ ID NO: 481 - DNA, 28 bp, Artificial Sequence
  synthetic
gtagattgctgttctaccaagtaatcca

SEQ ID NO: 482 - DNA, 36 bp, Artificial Sequence; identical to SEQ ID NO: 14
  synthetic

SEQ ID NO: 483 - DNA, 64 bp, Artificial Sequence
  synthetic
gatttagactaccccaaaaacgaaggggactaaaacagtagattgctgttctaccaagtaatcc

SEQ ID NO: 484 - DNA, 28 bp, Artificial Sequence
  synthetic
agtagattgctgttctaccaagtaatcc

SEQ ID NO: 485 - DNA, 36 bp, Artificial Sequence; identical to SEQ ID NO: 14
  synthetic

SEQ ID NO: 486 - DNA, 64 bp, Artificial Sequence
  synthetic
gatttagactaccccaaaaacgaaggggactaaaacgagtagattgctgttctaccaagtaatc

SEQ ID NO: 487 - DNA, 28 bp, Artificial Sequence
  synthetic
gagtagattgctgttctaccaagtaatc

SEQ ID NO: 488 - DNA, 36 bp, Artificial Sequence; identical to SEQ ID NO: 14
  synthetic

SEQ ID NO: 489 - DNA, 64 bp, Artificial Sequence
  synthetic
gatttagactaccccaaaaacgaaggggactaaaactcgagtagattgctgttctaccaagtaa

SEQ ID NO: 490 - DNA, 28 bp, Artificial Sequence
  synthetic
tcgagtagattgctgttctaccaagtaa

SEQ ID NO: 491 - DNA, 36 bp, Artificial Sequence; identical to SEQ ID NO: 14
  synthetic

SEQ ID NO: 492 - DNA, 64 bp, Artificial Sequence
  synthetic
gatttagactaccccaaaaacgaaggggactaaaacgtcgagtagattgctgttctaccaagta

SEQ ID NO: 493 - DNA, 28 bp, Artificial Sequence
  synthetic
gtcgagtagattgctgttctaccaagta

SEQ ID NO: 494 - DNA, 36 bp, Artificial Sequence; identical to SEQ ID NO: 14
  synthetic

SEQ ID NO: 495 - DNA, 64 bp, Artificial Sequence
  synthetic
gatttagactaccccaaaaacgaaggggactaaaaccaggtcgagtagattgctgttctaccaa

SEQ ID NO: 496 - DNA, 28 bp, Artificial Sequence
  synthetic
caggtcgagtagattgctgttctaccaa

SEQ ID NO: 497 - DNA, 36 bp, Artificial Sequence; identical to SEQ ID NO: 14
  synthetic

SEQ ID NO: 498 - DNA, 64 bp, Artificial Sequence
  synthetic
gatttagactaccccaaaaacgaaggggactaaaacgcaggtcgagtagattgctgttctacca

SEQ ID NO: 499 - DNA, 28 bp, Artificial Sequence
  synthetic
gcaggtcgagtagattgctgttctacca

SEQ ID NO: 500 - DNA, 36 bp, Artificial Sequence; identical to SEQ ID NO: 14
  synthetic

SEQ ID NO: 501 - DNA, 64 bp, Artificial Sequence
  synthetic
gatttagactaccccaaaaacgaaggggactaaaactgcaggtcgagtagattgctgttctacc

SEQ ID NO: 502 - DNA, 28 bp, Artificial Sequence
  synthetic
tgcaggtcgagtagattgctgttctacc

SEQ ID NO: 503 - DNA, 36 bp, Artificial Sequence; identical to SEQ ID NO: 14
  synthetic

SEQ ID NO: 504 - DNA, 64 bp, Artificial Sequence
  synthetic
gatttagactaccccaaaaacgaaggggactaaaacctgcaggtcgagtagattgctgttctac

SEQ ID NO: 505 - DNA, 28 bp, Artificial Sequence
  synthetic
ctgcaggtcgagtagattgctgttctac

SEQ ID NO: 506 - DNA, 36 bp, Artificial Sequence; identical to SEQ ID NO: 14
  synthetic

SEQ ID NO: 507 - DNA, 64 bp, Artificial Sequence
  synthetic
gatttagactaccccaaaaacgaaggggactaaaaccctgcaggtcgagtagattgctgttcta

SEQ ID NO: 508 - DNA, 28 bp, Artificial Sequence
  synthetic
cctgcaggtcgagtagattgctgttcta

SEQ ID NO: 509 - DNA, 36 bp, Artificial Sequence; identical to SEQ ID NO: 14
  synthetic

SEQ ID NO: 510 - DNA, 64 bp, Artificial Sequence
  synthetic
gatttagactaccccaaaaacgaaggggactaaaactgcctgcaggtcgagtagattgctgttc

SEQ ID NO: 511 - DNA, 28 bp, Artificial Sequence
  synthetic
tgcctgcaggtcgagtagattgctgttc

SEQ ID NO: 512 - DNA, 36 bp, Artificial Sequence; identical to SEQ ID NO: 14
  synthetic

SEQ ID NO: 513 - DNA, 64 bp, Artificial Sequence
  synthetic
gatttagactaccccaaaaacgaaggggactaaaacatgcctgcaggtcgagtagattgctgtt

SEQ ID NO: 514 - DNA, 28 bp, Artificial Sequence
  synthetic
atgcctgcaggtcgagtagattgctgtt

SEQ ID NO: 515 - DNA, 36 bp, Artificial Sequence; identical to SEQ ID NO: 14
  synthetic

SEQ ID NO: 516 - DNA, 64 bp, Artificial Sequence
  synthetic
gatttagactaccccaaaaacgaaggggactaaaaccatgcctgcaggtcgagtagattgctgt

SEQ ID NO: 517 - DNA, 28 bp, Artificial Sequence
  synthetic
catgcctgcaggtcgagtagattgctgt

SEQ ID NO: 518 - DNA, 36 bp, Artificial Sequence; identical to SEQ ID NO: 14
  synthetic

SEQ ID NO: 519 - DNA, 64 bp, Artificial Sequence
  synthetic
gatttagactaccccaaaaacgaaggggactaaaactgcatgcctgcaggtcgagtagattgct

SEQ ID NO: 520 - DNA, 28 bp, Artificial Sequence
  synthetic
tgcatgcctgcaggtcgagtagattgct

SEQ ID NO: 521 - DNA, 36 bp, Artificial Sequence; identical to SEQ ID NO: 14
  synthetic

SEQ ID NO: 522 - DNA, 64 bp, Artificial Sequence
  synthetic
gatttagactaccccaaaaacgaaggggactaaaaccttgcatgcctgcaggtcgagtagattg

SEQ ID NO: 523 - DNA, 28 bp, Artificial Sequence
  synthetic
cttgcatgcctgcaggtcgagtagattg

SEQ ID NO: 524 - DNA, 36 bp, Artificial Sequence; identical to SEQ ID NO: 14
  synthetic

SEQ ID NO: 525 - DNA, 64 bp, Artificial Sequence
  synthetic
gatttagactaccccaaaaacgaaggggactaaaacagcttgcatgcctgcaggtcgagtagat

SEQ ID NO: 526 - DNA, 28 bp, Artificial Sequence
  synthetic
agcttgcatgcctgcaggtcgagtagat

SEQ ID NO: 527 - DNA, 36 bp, Artificial Sequence; identical to SEQ ID NO: 14
  synthetic

SEQ ID NO: 528 - DNA, 64 bp, Artificial Sequence
  synthetic
gatttagactaccccaaaaacgaaggggactaaaaccaagcttgcatgcctgcaggtcgagtag

SEQ ID NO: 529 - DNA, 28 bp, Artificial Sequence
  synthetic
caagcttgcatgcctgcaggtcgagtag

SEQ ID NO: 530 - DNA, 36 bp, Artificial Sequence; identical to SEQ ID NO: 14
  synthetic

SEQ ID NO: 531 - DNA, 64 bp, Artificial Sequence
  synthetic
gatttagactaccccaaaaacgaaggggactaaaacccaagcttgcatgcctgcaggtcgagta

SEQ ID NO: 532 - DNA, 28 bp, Artificial Sequence
  synthetic
ccaagcttgcatgcctgcaggtcgagta

SEQ ID NO: 533 - DNA, 36 bp, Artificial Sequence; identical to SEQ ID NO: 14
  synthetic

SEQ ID NO: 534 - DNA, 64 bp, Artificial Sequence
  synthetic
gatttagactaccccaaaaacgaaggggactaaaaccgccaagcttgcatgcctgcaggtcgag

SEQ ID NO: 535 - DNA, 28 bp, Artificial Sequence
  synthetic
cgccaagcttgcatgcctgcaggtcgag

SEQ ID NO: 536 - DNA, 36 bp, Artificial Sequence; identical to SEQ ID NO: 14
  synthetic

SEQ ID NO: 537 - DNA, 64 bp, Artificial Sequence
  synthetic
gatttagactaccccaaaaacgaaggggactaaaacacgccaagcttgcatgcctgcaggtcga

SEQ ID NO: 538 - DNA, 28 bp, Artificial Sequence
  synthetic
acgccaagcttgcatgcctgcaggtcga

SEQ ID NO: 539 - DNA, 36 bp, Artificial Sequence; identical to SEQ ID NO: 14
  synthetic

SEQ ID NO: 540 - DNA, 64 bp, Artificial Sequence
  synthetic
gatttagactaccccaaaaacgaaggggactaaaactacgccaagcttgcatgcctgcaggtcg

SEQ ID NO: 541 - DNA, 28 bp, Artificial Sequence
  synthetic
tacgccaagcttgcatgcctgcaggtcg

SEQ ID NO: 542 - DNA, 36 bp, Artificial Sequence; identical to SEQ ID NO: 14
  synthetic

SEQ ID NO: 543 - DNA, 64 bp, Artificial Sequence
  synthetic
gatttagactaccccaaaaacgaaggggactaaaacttacgccaagcttgcatgcctgcaggtc

SEQ ID NO: 544 - DNA, 28 bp, Artificial Sequence
  synthetic
ttacgccaagcttgcatgcctgcaggtc

SEQ ID NO: 545 - DNA, 36 bp, Artificial Sequence; identical to SEQ ID NO: 14
  synthetic

SEQ ID NO: 546 - DNA, 64 bp, Artificial Sequence
  synthetic
gatttagactaccccaaaaacgaaggggactaaaacattacgccaagcttgcatgcctgcaggt

SEQ ID NO: 547 - DNA, 28 bp, Artificial Sequence
  synthetic
attacgccaagcttgcatgcctgcaggt

SEQ ID NO: 548 - DNA, 36 bp, Artificial Sequence; identical to SEQ ID NO: 14
  synthetic

SEQ ID NO: 549 - DNA, 64 bp, Artificial Sequence
  synthetic
gatttagactaccccaaaaacgaaggggactaaaacgattacgccaagcttgcatgcctgcagg

SEQ ID NO: 550 - DNA, 28 bp, Artificial Sequence
  synthetic
gattacgccaagcttgcatgcctgcagg

SEQ ID NO: 551 - DNA, 36 bp, Artificial Sequence; identical to SEQ ID NO: 14
  synthetic

SEQ ID NO: 552 - DNA, 64 bp, Artificial Sequence
  synthetic
gatttagactaccccaaaaacgaaggggactaaaacccatgattacgccaagcttgcatgcctg

SEQ ID NO: 553 - DNA, 28 bp, Artificial Sequence
  synthetic
ccatgattacgccaagcttgcatgcctg

SEQ ID NO: 554 - DNA, 36 bp, Artificial Sequence; identical to SEQ ID NO: 14
  synthetic

SEQ ID NO: 555 - DNA, 64 bp, Artificial Sequence
  synthetic
gatttagactaccccaaaaacgaaggggactaaaacaccatgattacgccaagcttgcatgcct

SEQ ID NO: 556 - DNA, 28 bp, Artificial Sequence
  synthetic
accatgattacgccaagcttgcatgcct

SEQ ID NO: 557 - DNA, 36 bp, Artificial Sequence; identical to SEQ ID NO: 14
  synthetic

SEQ ID NO: 558 - DNA, 64 bp, Artificial Sequence
  synthetic
gatttagactaccccaaaaacgaaggggactaaaacgaccatgattacgccaagcttgcatgcc

SEQ ID NO: 559 - DNA, 28 bp, Artificial Sequence
  synthetic
gaccatgattacgccaagcttgcatgcc

SEQ ID NO: 560 - DNA, 36 bp, Artificial Sequence; identical to SEQ ID NO: 14
  synthetic

SEQ ID NO: 561 - DNA, 64 bp, Artificial Sequence
  synthetic
gatttagactaccccaaaaacgaaggggactaaaacatgaccatgattacgccaagcttgcatg

SEQ ID NO: 562 - DNA, 28 bp, Artificial Sequence
  synthetic
atgaccatgattacgccaagcttgcatg

SEQ ID NO: 563 - DNA, 36 bp, Artificial Sequence; identical to SEQ ID NO: 14
  synthetic

SEQ ID NO: 564 - DNA, 64 bp, Artificial Sequence
  synthetic
gatttagactaccccaaaaacgaaggggactaaaactatgaccatgattacgccaagcttgcat

SEQ ID NO: 565 - DNA, 28 bp, Artificial Sequence
  synthetic
tatgaccatgattacgccaagcttgcat

SEQ ID NO: 566 - DNA, 36 bp, Artificial Sequence; identical to SEQ ID NO: 14
  synthetic

SEQ ID NO: 567 - DNA, 64 bp, Artificial Sequence
  synthetic
gatttagactaccccaaaaacgaaggggactaaaacagctatgaccatgattacgccaagcttg

SEQ ID NO: 568 - DNA, 28 bp, Artificial Sequence
  synthetic
agctatgaccatgattacgccaagcttg

SEQ ID NO: 569 - DNA, 36 bp, Artificial Sequence; identical to SEQ ID NO: 14
  synthetic

SEQ ID NO: 570 - DNA, 64 bp, Artificial Sequence
  synthetic
gatttagactaccccaaaaacgaaggggactaaaaccagctatgaccatgattacgccaagctt

SEQ ID NO: 571 - DNA, 28 bp, Artificial Sequence
  synthetic
cagctatgaccatgattacgccaagctt

SEQ ID NO: 572 - DNA, 36 bp, Artificial Sequence; identical to SEQ ID NO: 14
  synthetic

SEQ ID NO: 573 - DNA, 64 bp, Artificial Sequence
  synthetic
gatttagactaccccaaaaacgaaggggactaaaacacagctatgaccatgattacgccaagct

SEQ ID NO: 574 - DNA, 28 bp, Artificial Sequence
  synthetic
acagctatgaccatgattacgccaagct

SEQ ID NO: 575 - DNA, 36 bp, Artificial Sequence; identical to SEQ ID NO: 14
  synthetic

SEQ ID NO: 576 - DNA, 64 bp, Artificial Sequence
  synthetic
gatttagactaccccaaaaacgaaggggactaaaacaacagctatgaccatgattacgccaagc

SEQ ID NO: 577 - DNA, 28 bp, Artificial Sequence
  synthetic
aacagctatgaccatgattacgccaagc

SEQ ID NO: 578 - DNA, 36 bp, Artificial Sequence; identical to SEQ ID NO: 14
  synthetic

SEQ ID NO: 579 - DNA, 64 bp, Artificial Sequence
  synthetic
gatttagactaccccaaaaacgaaggggactaaaacaacacaggaaacagctatgaccatgatt

SEQ ID NO: 580 - DNA, 28 bp, Artificial Sequence
  synthetic
aacacaggaaacagctatgaccatgatt

SEQ ID NO: 581 - DNA, 36 bp, Artificial Sequence; identical to SEQ ID NO: 14
  synthetic

SEQ ID NO: 582 - DNA, 64 bp, Artificial Sequence
  synthetic
gatttagactaccccaaaaacgaaggggactaaaactaaacacaggaaacagctatgaccatga

SEQ ID NO: 583 - DNA, 28 bp, Artificial Sequence
  synthetic
taaacacaggaaacagctatgaccatga

SEQ ID NO: 584 - DNA, 36 bp, Artificial Sequence; identical to SEQ ID NO: 14
  synthetic

SEQ ID NO: 585 - DNA, 64 bp, Artificial Sequence
  synthetic
gatttagactaccccaaaaacgaaggggactaaaacataaacacaggaaacagctatgaccatg

SEQ ID NO: 586 - DNA, 28 bp, Artificial Sequence
  synthetic
ataaacacaggaaacagctatgaccatg

SEQ ID NO: 587 - DNA, 36 bp, Artificial Sequence; identical to SEQ ID NO: 14
  synthetic

SEQ ID NO: 588 - DNA, 64 bp, Artificial Sequence
  synthetic
gatttagactaccccaaaaacgaaggggactaaaacgataaacacaggaaacagctatgaccat

SEQ ID NO: 589 - DNA, 28 bp, Artificial Sequence
  synthetic
gataaacacaggaaacagctatgaccat

SEQ ID NO: 590 - DNA, 36 bp, Artificial Sequence; identical to SEQ ID NO: 14
  synthetic

SEQ ID NO: 591 - DNA, 64 bp, Artificial Sequence
  synthetic
gatttagactaccccaaaaacgaaggggactaaaacggataaacacaggaaacagctatgacca

SEQ ID NO: 592 - DNA, 28 bp, Artificial Sequence
  synthetic
ggataaacacaggaaacagctatgacca

SEQ ID NO: 593 - DNA, 36 bp, Artificial Sequence; identical to SEQ ID NO: 14
  synthetic

SEQ ID NO: 594 - DNA, 64 bp, Artificial Sequence
  synthetic
gatttagactaccccaaaaacgaaggggactaaaaccggataaacacaggaaacagctatgacc

SEQ ID NO: 595 - DNA, 28 bp, Artificial Sequence
  synthetic
cggataaacacaggaaacagctatgacc

SEQ ID NO: 596 - DNA, 36 bp, Artificial Sequence; identical to SEQ ID NO: 14
  synthetic

SEQ ID NO: 597 - DNA, 64 bp, Artificial Sequence
  synthetic
gatttagactaccccaaaaacgaaggggactaaaacgcggataaacacaggaaacagctatgac

SEQ ID NO: 598 - DNA, 28 bp, Artificial Sequence
  synthetic
gcggataaacacaggaaacagctatgac

SEQ ID NO: 599 - DNA, 36 bp, Artificial Sequence; identical to SEQ ID NO: 14
  synthetic

SEQ ID NO: 600 - DNA, 64 bp, Artificial Sequence
  synthetic
gatttagactaccccaaaaacgaaggggactaaaacagcggataaacacaggaaacagctatga

SEQ ID NO: 601 - DNA, 28 bp, Artificial Sequence
  synthetic
agcggataaacacaggaaacagctatga

SEQ ID NO: 602 - DNA, 36 bp, Artificial Sequence; identical to SEQ ID NO: 14
  synthetic

SEQ ID NO: 603 - DNA, 64 bp, Artificial Sequence
  synthetic
gatttagactaccccaaaaacgaaggggactaaaactgagcggataaacacaggaaacagctat

SEQ ID NO: 604 - DNA, 28 bp, Artificial Sequence
  synthetic
tgagcggataaacacaggaaacagctat

SEQ ID NO: 605 - DNA, 36 bp, Artificial Sequence; identical to SEQ ID NO: 14
  synthetic

SEQ ID NO: 606 - DNA, 64 bp, Artificial Sequence
  synthetic
gatttagactaccccaaaaacgaaggggactaaaactgtgagcggataaacacaggaaacagct

SEQ ID NO: 607 - DNA, 28 bp, Artificial Sequence
  synthetic
tgtgagcggataaacacaggaaacagct

SEQ ID NO: 608 - DNA, 36 bp, Artificial Sequence; identical to SEQ ID NO: 14
  synthetic

SEQ ID NO: 609 - DNA, 64 bp, Artificial Sequence
  synthetic
gatttagactaccccaaaaacgaaggggactaaaacttgtgagcggataaacacaggaaacagc

SEQ ID NO: 610 - DNA, 28 bp, Artificial Sequence
  synthetic
ttgtgagcggataaacacaggaaacagc

SEQ ID NO: 611 - DNA, 36 bp, Artificial Sequence; identical to SEQ ID NO: 14
  synthetic

SEQ ID NO: 612 - DNA, 64 bp, Artificial Sequence
  synthetic
gatttagactaccccaaaaacgaaggggactaaaacggaattgtgagcggataaacacaggaaa

SEQ ID NO: 613 - DNA, 28 bp, Artificial Sequence
  synthetic
ggaattgtgagcggataaacacaggaaa

SEQ ID NO: 614 - DNA, 36 bp, Artificial Sequence; identical to SEQ ID NO: 14
  synthetic

SEQ ID NO: 615 - DNA, 64 bp, Artificial Sequence
  synthetic
gatttagactaccccaaaaacgaaggggactaaaactggaattgtgagcggataaacacaggaa

SEQ ID NO: 616 - DNA, 28 bp, Artificial Sequence
  synthetic
tggaattgtgagcggataaacacaggaa

SEQ ID NO: 617 - DNA, 36 bp, Artificial Sequence; identical to SEQ ID NO: 14
  synthetic

SEQ ID NO: 618 - DNA, 64 bp, Artificial Sequence
  synthetic
gatttagactaccccaaaaacgaaggggactaaaacgtggaattgtgagcggataaacacagga

SEQ ID NO: 619 - DNA, 28 bp, Artificial Sequence
  synthetic
gtggaattgtgagcggataaacacagga

SEQ ID NO: 620 - DNA, 36 bp, Artificial Sequence; identical to SEQ ID NO: 14
  synthetic

SEQ ID NO: 621 - DNA, 64 bp, Artificial Sequence
  synthetic
gatttagactaccccaaaaacgaaggggactaaaactgtggaattgtgagcggataaacacagg

SEQ ID NO: 622 - DNA, 28 bp, Artificial Sequence
  synthetic
tgtggaattgtgagcggataaacacagg

SEQ ID NO: 623 - DNA, 36 bp, Artificial Sequence; identical to SEQ ID NO: 14
  synthetic

SEQ ID NO: 624 - DNA, 64 bp, Artificial Sequence
  synthetic
gatttagactaccccaaaaacgaaggggactaaaactgtgtggaattgtgagcggataaacaca

SEQ ID NO: 625 - DNA, 28 bp, Artificial Sequence
  synthetic
tgtgtggaattgtgagcggataaacaca

SEQ ID NO: 626 - DNA, 36 bp, Artificial Sequence; identical to SEQ ID NO: 14
  synthetic

SEQ ID NO: 627 - DNA, 64 bp, Artificial Sequence
  synthetic
gatttagactaccccaaaaacgaaggggactaaaacttgtgtggaattgtgagcggataaacac

SEQ ID NO: 628 - DNA, 28 bp, Artificial Sequence
  synthetic
ttgtgtggaattgtgagcggataaacac

SEQ ID NO: 629 - DNA, 36 bp, Artificial Sequence; identical to SEQ ID NO: 14
  synthetic

SEQ ID NO: 630 - DNA, 64 bp, Artificial Sequence
  synthetic
gatttagactaccccaaaaacgaaggggactaaaacgttgtgtggaattgtgagcggataaaca

SEQ ID NO: 631 - DNA, 28 bp, Artificial Sequence
  synthetic
gttgtgtggaattgtgagcggataaaca

SEQ ID NO: 632 - DNA, 36 bp, Artificial Sequence; identical to SEQ ID NO: 14
  synthetic

SEQ ID NO: 633 - DNA, 64 bp, Artificial Sequence
  synthetic
gatttagactaccccaaaaacgaaggggactaaaacatgttgtgtggaattgtgagcggataaa

SEQ ID NO: 634 - DNA, 28 bp, Artificial Sequence
  synthetic
atgttgtgtggaattgtgagcggataaa

SEQ ID NO: 635 - DNA, 36 bp, Artificial Sequence; identical to SEQ ID NO: 14
  synthetic

SEQ ID NO: 636 - DNA, 64 bp, Artificial Sequence
  synthetic
gatttagactaccccaaaaacgaaggggactaaaactatgttgtgtggaattgtgagcggataa

SEQ ID NO: 637 - DNA, 28 bp, Artificial Sequence
  synthetic
tatgttgtgtggaattgtgagcggataa

SEQ ID NO: 638 - DNA, 36 bp, Artificial Sequence; identical to SEQ ID NO: 14
  synthetic

SEQ ID NO: 639 - DNA, 64 bp, Artificial Sequence
  synthetic
gatttagactaccccaaaaacgaaggggactaaaactcgtatgttgtgtggaattgtgagcgga

SEQ ID NO: 640 - DNA, 28 bp, Artificial Sequence
  synthetic
tcgtatgttgtgtggaattgtgagcgga

SEQ ID NO: 641 - DNA, 36 bp, Artificial Sequence; identical to SEQ ID NO: 14
  synthetic

SEQ ID NO: 642 - DNA, 64 bp, Artificial Sequence
  synthetic
gatttagactaccccaaaaacgaaggggactaaaacggctcgtatgttgtgtggaattgtgagc

SEQ ID NO: 643 - DNA, 28 bp, Artificial Sequence
  synthetic
ggctcgtatgttgtgtggaattgtgagc

SEQ ID NO: 644 - DNA, 36 bp, Artificial Sequence; identical to SEQ ID NO: 14
  synthetic

SEQ ID NO: 645 - DNA, 64 bp, Artificial Sequence
  synthetic
gatttagactaccccaaaaacgaaggggactaaaaccggctcgtatgttgtgtggaattgtgag

SEQ ID NO: 646 - DNA, 28 bp, Artificial Sequence
  synthetic
cggctcgtatgttgtgtggaattgtgag

SEQ ID NO: 647 - DNA, 36 bp, Artificial Sequence; identical to SEQ ID NO: 14
  synthetic

SEQ ID NO: 648 - DNA, 64 bp, Artificial Sequence
  synthetic
gatttagactaccccaaaaacgaaggggactaaaacccggctcgtatgttgtgtggaattgtga

SEQ ID NO: 649 - DNA, 28 bp, Artificial Sequence
  synthetic
ccggctcgtatgttgtgtggaattgtga

SEQ ID NO: 650 - DNA, 36 bp, Artificial Sequence; identical to SEQ ID NO: 14
  synthetic

SEQ ID NO: 651 - DNA, 64 bp, Artificial Sequence
  synthetic
gatttagactaccccaaaaacgaaggggactaaaacttccggctcgtatgttgtgtggaattgt

SEQ ID NO: 652 - DNA, 28 bp, Artificial Sequence
  synthetic
ttccggctcgtatgttgtgtggaattgt

SEQ ID NO: 653 - DNA, 36 bp, Artificial Sequence; identical to SEQ ID NO: 14
  synthetic

SEQ ID NO: 654 - DNA, 64 bp, Artificial Sequence
  synthetic
gatttagactaccccaaaaacgaaggggactaaaaccttccggctcgtatgttgtgtggaattg

SEQ ID NO: 655 - DNA, 28 bp, Artificial Sequence
  synthetic
cttccggctcgtatgttgtgtggaattg

SEQ ID NO: 656 - DNA, 36 bp, Artificial Sequence; identical to SEQ ID NO: 14
  synthetic

SEQ ID NO: 657 - DNA, 64 bp, Artificial Sequence
  synthetic
gatttagactaccccaaaaacgaaggggactaaaacgcttccggctcgtatgttgtgtggaatt

SEQ ID NO: 658 - DNA, 28 bp, Artificial Sequence
  synthetic
gcttccggctcgtatgttgtgtggaatt

SEQ ID NO: 659 - DNA, 36 bp, Artificial Sequence; identical to SEQ ID NO: 14
  synthetic

SEQ ID NO: 660 - DNA, 64 bp, Artificial Sequence
  synthetic
gatttagactaccccaaaaacgaaggggactaaaacatgcttccggctcgtatgttgtgtggaa

SEQ ID NO: 661 - DNA, 28 bp, Artificial Sequence
  synthetic
atgcttccggctcgtatgttgtgtggaa

SEQ ID NO: 662 - DNA, 36 bp, Artificial Sequence; identical to SEQ ID NO: 14
  synthetic

SEQ ID NO: 663 - DNA, 64 bp, Artificial Sequence
  synthetic
gatttagactaccccaaaaacgaaggggactaaaactatgcttccggctcgtatgttgtgtgga

SEQ ID NO: 664 - DNA, 28 bp, Artificial Sequence
  synthetic
tatgcttccggctcgtatgttgtgtgga

SEQ ID NO: 665 - DNA, 36 bp, Artificial Sequence; identical to SEQ ID NO: 14
  synthetic

SEQ ID NO: 666 - DNA, 64 bp, Artificial Sequence
  synthetic
gatttagactaccccaaaaacgaaggggactaaaacttatgcttccggctcgtatgttgtgtgg

SEQ ID NO: 667 - DNA, 28 bp, Artificial Sequence
  synthetic
ttatgcttccggctcgtatgttgtgtgg

SEQ ID NO: 668 - DNA, 36 bp, Artificial Sequence; identical to SEQ ID NO: 14
  synthetic

SEQ ID NO: 669 - DNA, 64 bp, Artificial Sequence
  synthetic
gatttagactaccccaaaaacgaaggggactaaaactaatttaacagtatcaccatcaatcgct

SEQ ID NO: 670 - DNA, 28 bp, Artificial Sequence
  synthetic
taatttaacagtatcaccatcaatcgct

SEQ ID NO: 671 - DNA, 36 bp, Artificial Sequence; identical to SEQ ID NO: 14
  synthetic

SEQ ID NO: 672 - DNA, 64 bp, Artificial Sequence
  synthetic
gatttagactaccccaaaaacgaaggggactaaaacttaatttaacagtatcaccatcaatcgc

SEQ ID NO: 673 - DNA, 28 bp, Artificial Sequence
  synthetic
ttaatttaacagtatcaccatcaatcgc

SEQ ID NO: 674 - DNA, 36 bp, Artificial Sequence; identical to SEQ ID NO: 14
  synthetic

SEQ ID NO: 675 - DNA, 64 bp, Artificial Sequence
  synthetic
gatttagactaccccaaaaacgaaggggactaaaacattaatttaacagtatcaccatcaatcg

SEQ ID NO: 676 - DNA, 28 bp, Artificial Sequence
  synthetic
attaatttaacagtatcaccatcaatcg

SEQ ID NO: 677 - DNA, 36 bp, Artificial Sequence; identical to SEQ ID NO: 14
  synthetic

SEQ ID NO: 678 - DNA, 64 bp, Artificial Sequence
  synthetic
gatttagactaccccaaaaacgaaggggactaaaaccattaatttaacagtatcaccatcaatc

SEQ ID NO: 679 - DNA, 28 bp, Artificial Sequence
  synthetic
cattaatttaacagtatcaccatcaatc

SEQ ID NO: 680 - DNA, 36 bp, Artificial Sequence; identical to SEQ ID NO: 14
  synthetic

SEQ ID NO: 681 - DNA, 64 bp, Artificial Sequence
  synthetic
gatttagactaccccaaaaacgaaggggactaaaacacattaatttaacagtatcaccatcaat

SEQ ID NO: 682 - DNA, 28 bp, Artificial Sequence
  synthetic
acattaatttaacagtatcaccatcaat

SEQ ID NO: 683 - DNA, 36 bp, Artificial Sequence; identical to SEQ ID NO: 14
  synthetic

SEQ ID NO: 684 - DNA, 64 bp, Artificial Sequence
  synthetic
gatttagactaccccaaaaacgaaggggactaaaactacattaatttaacagtatcaccatcaa

SEQ ID NO: 685 - DNA, 28 bp, Artificial Sequence
  synthetic
tacattaatttaacagtatcaccatcaa

SEQ ID NO: 686 - DNA, 36 bp, Artificial Sequence; identical to SEQ ID NO: 14
  synthetic

SEQ ID NO: 687 - DNA, 64 bp, Artificial Sequence
  synthetic
gatttagactaccccaaaaacgaaggggactaaaacgtacattaatttaacagtatcaccatca

SEQ ID NO: 688 - DNA, 28 bp, Artificial Sequence
  synthetic
gtacattaatttaacagtatcaccatca

SEQ ID NO: 689 - DNA, 36 bp, Artificial Sequence; identical to SEQ ID NO: 14
  synthetic

SEQ ID NO: 690 - DNA, 64 bp, Artificial Sequence
  synthetic
gatttagactaccccaaaaacgaaggggactaaaactgtacattaatttaacagtatcaccatc

SEQ ID NO: 691 - DNA, 28 bp, Artificial Sequence
  synthetic
tgtacattaatttaacagtatcaccatc

SEQ ID NO: 692 - DNA, 36 bp, Artificial Sequence; identical to SEQ ID NO: 14
  synthetic

SEQ ID NO: 693 - DNA, 64 bp, Artificial Sequence
  synthetic
gatttagactaccccaaaaacgaaggggactaaaacttgtacattaatttaacagtatcaccat

SEQ ID NO: 694 - DNA, 28 bp, Artificial Sequence
  synthetic
ttgtacattaatttaacagtatcaccat

SEQ ID NO: 695 - DNA, 36 bp, Artificial Sequence; identical to SEQ ID NO: 14
  synthetic

SEQ ID NO: 696 - DNA, 64 bp, Artificial Sequence
  synthetic
gatttagactaccccaaaaacgaaggggactaaaactttgtacattaatttaacagtatcacca

SEQ ID NO: 697 - DNA, 28 bp, Artificial Sequence
  synthetic
tttgtacattaatttaacagtatcacca

SEQ ID NO: 698 - DNA, 36 bp, Artificial Sequence; identical to SEQ ID NO: 14
  synthetic

SEQ ID NO: 699 - DNA, 64 bp, Artificial Sequence
  synthetic
gatttagactaccccaaaaacgaaggggactaaaacctttgtacattaatttaacagtatcacc

SEQ ID NO: 700 - DNA, 28 bp, Artificial Sequence
  synthetic
ctttgtacattaatttaacagtatcacc

SEQ ID NO: 701 - DNA, 36 bp, Artificial Sequence; identical to SEQ ID NO: 14
  synthetic

SEQ ID NO: 702 - DNA, 64 bp, Artificial Sequence
  synthetic
gatttagactaccccaaaaacgaaggggactaaaaccctttgtacattaatttaacagtatcac

SEQ ID NO: 703 - DNA, 28 bp, Artificial Sequence
  synthetic
cctttgtacattaatttaacagtatcac

SEQ ID NO: 704 - DNA, 36 bp, Artificial Sequence; identical to SEQ ID NO: 14
  synthetic

SEQ ID NO: 705 - DNA, 64 bp, Artificial Sequence
  synthetic
gatttagactaccccaaaaacgaaggggactaaaacacctttgtacattaatttaacagtatca

SEQ ID NO: 706 - DNA, 28 bp, Artificial Sequence
  synthetic
acctttgtacattaatttaacagtatca

SEQ ID NO: 707 - DNA, 36 bp, Artificial Sequence; identical to SEQ ID NO: 14
  synthetic

SEQ ID NO: 708 - DNA, 64 bp, Artificial Sequence
  synthetic
gatttagactaccccaaaaacgaaggggactaaaacgacctttgtacattaatttaacagtatc

SEQ ID NO: 709 - DNA, 28 bp, Artificial Sequence
  synthetic
gacctttgtacattaatttaacagtatc

SEQ ID NO: 710 - DNA, 36 bp, Artificial Sequence; identical to SEQ ID NO: 14
  synthetic

SEQ ID NO: 711 - DNA, 64 bp, Artificial Sequence
  synthetic
gatttagactaccccaaaaacgaaggggactaaaactgacctttgtacattaatttaacagtat

SEQ ID NO: 712 - DNA, 28 bp, Artificial Sequence
  synthetic
tgacctttgtacattaatttaacagtat

SEQ ID NO: 713 - DNA, 36 bp, Artificial Sequence; identical to SEQ ID NO: 14
  synthetic

SEQ ID NO: 714 - DNA, 64 bp, Artificial Sequence
  synthetic
gatttagactaccccaaaaacgaaggggactaaaacttgacctttgtacattaatttaacagta

SEQ ID NO: 715 - DNA, 28 bp, Artificial Sequence
  synthetic
ttgacctttgtacattaatttaacagta

SEQ ID NO: 716 - DNA, 36 bp, Artificial Sequence; identical to SEQ ID NO: 14
  synthetic

SEQ ID NO: 717 - DNA, 64 bp, Artificial Sequence
  synthetic
gatttagactaccccaaaaacgaaggggactaaaacgttgacctttgtacattaatttaacagt

SEQ ID NO: 718 - DNA, 28 bp, Artificial Sequence
  synthetic
gttgacctttgtacattaatttaacagt

SEQ ID NO: 719 - DNA, 36 bp, Artificial Sequence; identical to SEQ ID NO: 14
  synthetic

SEQ ID NO: 720 - DNA, 64 bp, Artificial Sequence
  synthetic
gatttagactaccccaaaaacgaaggggactaaaacggttgacctttgtacattaatttaacag

SEQ ID NO: 721 - DNA, 28 bp, Artificial Sequence
  synthetic
ggttgacctttgtacattaatttaacag

SEQ ID NO: 722 - DNA, 36 bp, Artificial Sequence; identical to SEQ ID NO: 14
  synthetic

SEQ ID NO: 723 - DNA, 64 bp, Artificial Sequence
  synthetic
gatttagactaccccaaaaacgaaggggactaaaactggttgacctttgtacattaatttaaca

SEQ ID NO: 724 - DNA, 28 bp, Artificial Sequence
  synthetic
tggttgacctttgtacattaatttaaca

SEQ ID NO: 725 - DNA, 36 bp, Artificial Sequence; identical to SEQ ID NO: 14
  synthetic

SEQ ID NO: 726 - DNA, 64 bp, Artificial Sequence
  synthetic
gatttagactaccccaaaaacgaaggggactaaaacttggttgacctttgtacattaatttaac

SEQ ID NO: 727 - DNA, 28 bp, Artificial Sequence
  synthetic
ttggttgacctttgtacattaatttaac

SEQ ID NO: 728 - DNA, 36 bp, Artificial Sequence; identical to SEQ ID NO: 14
  synthetic

SEQ ID NO: 729 - DNA, 64 bp, Artificial Sequence
  synthetic
gatttagactaccccaaaaacgaaggggactaaaaccattggttgacctttgtacattaattta

SEQ ID NO: 730 - DNA, 28 bp, Artificial Sequence
  synthetic
cattggttgacctttgtacattaattta

SEQ ID NO: 731 - DNA, 36 bp, Artificial Sequence; identical to SEQ ID NO: 14
  synthetic

SEQ ID NO: 732 - DNA, 64 bp, Artificial Sequence
  synthetic
gatttagactaccccaaaaacgaaggggactaaaacgtcattggttgacctttgtacattaatt

SEQ ID NO: 733 - DNA, 28 bp, Artificial Sequence
  synthetic
gtcattggttgacctttgtacattaatt

SEQ ID NO: 734 - DNA, 36 bp, Artificial Sequence; identical to SEQ ID NO: 14
  synthetic

SEQ ID NO: 735 - DNA, 64 bp, Artificial Sequence
  synthetic
gatttagactaccccaaaaacgaaggggactaaaacatgtcattggttgacctttgtacattaa

SEQ ID NO: 736 - DNA, 28 bp, Artificial Sequence
  synthetic
atgtcattggttgacctttgtacattaa

SEQ ID NO: 737 - DNA, 36 bp, Artificial Sequence; identical to SEQ ID NO: 14
  synthetic

SEQ ID NO: 738 - DNA, 64 bp, Artificial Sequence
  synthetic
gatttagactaccccaaaaacgaaggggactaaaacgaatgtcattggttgacctttgtacatt

SEQ ID NO: 739 - DNA, 28 bp, Artificial Sequence
  synthetic
gaatgtcattggttgacctttgtacatt

SEQ ID NO: 740 - DNA, 36 bp, Artificial Sequence; identical to SEQ ID NO: 14
  synthetic

SEQ ID NO: 741 - DNA, 64 bp, Artificial Sequence
  synthetic
gatttagactaccccaaaaacgaaggggactaaaacctgaatgtcattggttgacctttgtaca

SEQ ID NO: 742 - DNA, 28 bp, Artificial Sequence
  synthetic
ctgaatgtcattggttgacctttgtaca

SEQ ID NO: 743 - DNA, 36 bp, Artificial Sequence; identical to SEQ ID NO: 14
  synthetic

SEQ ID NO: 744 - DNA, 64 bp, Artificial Sequence
  synthetic
gatttagactaccccaaaaacgaaggggactaaaacgtctgaatgtcattggttgacctttgta

SEQ ID NO: 745 - DNA, 28 bp, Artificial Sequence
  synthetic
gtctgaatgtcattggttgacctttgta

SEQ ID NO: 746 - DNA, 36 bp, Artificial Sequence; identical to SEQ ID NO: 14
  synthetic

SEQ ID NO: 747 - DNA, 64 bp, Artificial Sequence
  synthetic
gatttagactaccccaaaaacgaaggggactaaaactagtctgaatgtcattggttgacctttg

SEQ ID NO: 748 - DNA, 28 bp, Artificial Sequence
  synthetic
tagtctgaatgtcattggttgacctttg

SEQ ID NO: 749 - DNA, 36 bp, Artificial Sequence; identical to SEQ ID NO: 14
  synthetic

SEQ ID NO: 750 - DNA, 64 bp, Artificial Sequence
  synthetic
gatttagactaccccaaaaacgaaggggactaaaacaatagtctgaatgtcattggttgacctt

SEQ ID NO: 751 - DNA, 28 bp, Artificial Sequence
  synthetic
aatagtctgaatgtcattggttgacctt

SEQ ID NO: 752 - DNA, 36 bp, Artificial Sequence; identical to SEQ ID NO: 14
  synthetic

SEQ ID NO: 753 - DNA, 64 bp, Artificial Sequence
  synthetic
gatttagactaccccaaaaacgaaggggactaaaacataatagtctgaatgtcattggttgacc

SEQ ID NO: 754 - DNA, 28 bp, Artificial Sequence
  synthetic
ataatagtctgaatgtcattggttgacc

SEQ ID NO: 755 - DNA, 36 bp, Artificial Sequence; identical to SEQ ID NO: 14
  synthetic

SEQ ID NO: 756 - DNA, 64 bp, Artificial Sequence
  synthetic
gatttagactaccccaaaaacgaaggggactaaaaccaataatagtctgaatgtcattggttga

SEQ ID NO: 757 - DNA, 28 bp, Artificial Sequence
  synthetic
caataatagtctgaatgtcattggttga

SEQ ID NO: 758 - DNA, 36 bp, Artificial Sequence; identical to SEQ ID NO: 14
  synthetic

SEQ ID NO: 759 - DNA, 64 bp, Artificial Sequence
  synthetic
gatttagactaccccaaaaacgaaggggactaaaacaccaataatagtctgaatgtcattggtt

SEQ ID NO: 760 - DNA, 28 bp, Artificial Sequence
  synthetic
accaataatagtctgaatgtcattggtt

SEQ ID NO: 761 - DNA, 36 bp, Artificial Sequence; identical to SEQ ID NO: 14
  synthetic

SEQ ID NO: 762 - DNA, 64 bp, Artificial Sequence
  synthetic
gatttagactaccccaaaaacgaaggggactaaaaccaaccaataatagtctgaatgtcattgg

SEQ ID NO: 763 - DNA, 28 bp, Artificial Sequence
  synthetic
caaccaataatagtctgaatgtcattgg

SEQ ID NO: 764 - DNA, 36 bp, Artificial Sequence; identical to SEQ ID NO: 14
  synthetic

SEQ ID NO: 765 - DNA, 64 bp, Artificial Sequence
  synthetic
gatttagactaccccaaaaacgaaggggactaaaacatcaaccaataatagtctgaatgtcatt

SEQ ID NO: 766 - DNA, 28 bp, Artificial Sequence
  synthetic
atcaaccaataatagtctgaatgtcatt

SEQ ID NO: 767 - DNA, 36 bp, Artificial Sequence; identical to SEQ ID NO: 14
  synthetic

SEQ ID NO: 768 - DNA, 64 bp, Artificial Sequence
  synthetic
gatttagactaccccaaaaacgaaggggactaaaacgtatcaaccaataatagtctgaatgtca

SEQ ID NO: 769 - DNA, 28 bp, Artificial Sequence
  synthetic
gtatcaaccaataatagtctgaatgtca

SEQ ID NO: 770 - DNA, 36 bp, Artificial Sequence; identical to SEQ ID NO: 14
  synthetic

SEQ ID NO: 771 - DNA, 64 bp, Artificial Sequence
  synthetic
gatttagactaccccaaaaacgaaggggactaaaacgtgtatcaaccaataatagtctgaatgt

SEQ ID NO: 772 - DNA, 28 bp, Artificial Sequence
  synthetic
gtgtatcaaccaataatagtctgaatgt

SEQ ID NO: 773 - DNA, 36 bp, Artificial Sequence; identical to SEQ ID NO: 14
  synthetic

SEQ ID NO: 774 - DNA, 64 bp, Artificial Sequence
  synthetic
gatttagactaccccaaaaacgaaggggactaaaacaggtgtatcaaccaataatagtctgaat

SEQ ID NO: 775 - DNA, 28 bp, Artificial Sequence
  synthetic
aggtgtatcaaccaataatagtctgaat

SEQ ID NO: 776 - DNA, 36 bp, Artificial Sequence; identical to SEQ ID NO: 14
  synthetic

SEQ ID NO: 777 - DNA, 64 bp, Artificial Sequence
  synthetic
gatttagactaccccaaaaacgaaggggactaaaactcaggtgtatcaaccaataatagtctga

SEQ ID NO: 778 - DNA, 28 bp, Artificial Sequence
  synthetic
tcaggtgtatcaaccaataatagtctga

SEQ ID NO: 779 - DNA, 36 bp, Artificial Sequence; identical to SEQ ID NO: 14
  synthetic

SEQ ID NO: 780 - DNA, 64 bp, Artificial Sequence
  synthetic
gatttagactaccccaaaaacgaaggggactaaaactttcaggtgtatcaaccaataatagtct

SEQ ID NO: 781 - DNA, 28 bp, Artificial Sequence
  synthetic
tttcaggtgtatcaaccaataatagtct

SEQ ID NO: 782 - DNA, 36 bp, Artificial Sequence; identical to SEQ ID NO: 14
  synthetic

SEQ ID NO: 783 - DNA, 64 bp, Artificial Sequence
  synthetic
gatttagactaccccaaaaacgaaggggactaaaactgtttcaggtgtatcaaccaataatagt

SEQ ID NO: 784 - DNA, 28 bp, Artificial Sequence
  synthetic
tgtttcaggtgtatcaaccaataatagt

SEQ ID NO: 785 - DNA, 36 bp, Artificial Sequence; identical to SEQ ID NO: 14
  synthetic

SEQ ID NO: 786 - DNA, 64 bp, Artificial Sequence
  synthetic
gatttagactaccccaaaaacgaaggggactaaaactttgtttcaggtgtatcaaccaataata

SEQ ID NO: 787 - DNA, 28 bp, Artificial Sequence
  synthetic
tttgtttcaggtgtatcaaccaataata

SEQ ID NO: 788 - DNA, 36 bp, Artificial Sequence; identical to SEQ ID NO: 14
  synthetic

SEQ ID NO: 789 - DNA, 64 bp, Artificial Sequence
  synthetic
gatttagactaccccaaaaacgaaggggactaaaacgctttgtttcaggtgtatcaaccaataa

SEQ ID NO: 790 - DNA, 28 bp, Artificial Sequence
  synthetic
gctttgtttcaggtgtatcaaccaataa

SEQ ID NO: 791 - DNA, 36 bp, Artificial Sequence; identical to SEQ ID NO: 14
  synthetic

SEQ ID NO: 792 - DNA, 64 bp, Artificial Sequence
  synthetic
gatttagactaccccaaaaacgaaggggactaaaacatgctttgtttcaggtgtatcaaccaat

SEQ ID NO: 793 - DNA, 28 bp, Artificial Sequence
  synthetic
atgctttgtttcaggtgtatcaaccaat

SEQ ID NO: 794 - DNA, 36 bp, Artificial Sequence; identical to SEQ ID NO: 14
  synthetic

SEQ ID NO: 795 - DNA, 64 bp, Artificial Sequence
  synthetic
gatttagactaccccaaaaacgaaggggactaaaacggatgctttgtttcaggtgtatcaacca

SEQ ID NO: 796 - DNA, 28 bp, Artificial Sequence
  synthetic
ggatgctttgtttcaggtgtatcaacca

SEQ ID NO: 797 - DNA, 36 bp, Artificial Sequence; identical to SEQ ID NO: 14
  synthetic

SEQ ID NO: 798 - DNA, 64 bp, Artificial Sequence
  synthetic
gatttagactaccccaaaaacgaaggggactaaaactaggatgctttgtttcaggtgtatcaac

SEQ ID NO: 799 - DNA, 28 bp, Artificial Sequence
  synthetic
taggatgctttgtttcaggtgtatcaac

SEQ ID NO: 800 - DNA, 36 bp, Artificial Sequence; identical to SEQ ID NO: 14
  synthetic

SEQ ID NO: 801 - DNA, 64 bp, Artificial Sequence
  synthetic
gatttagactaccccaaaaacgaaggggactaaaactttaggatgctttgtttcaggtgtatca

SEQ ID NO: 802 - DNA, 28 bp, Artificial Sequence
  synthetic
tttaggatgctttgtttcaggtgtatca

SEQ ID NO: 803 - DNA, 36 bp, Artificial Sequence; identical to SEQ ID NO: 14
  synthetic

SEQ ID NO: 804 - DNA, 64 bp, Artificial Sequence
  synthetic
gatttagactaccccaaaaacgaaggggactaaaactttttaggatgctttgtttcaggtgtat

SEQ ID NO: 805 - DNA, 28 bp, Artificial Sequence
  synthetic
tttttaggatgctttgtttcaggtgtat

SEQ ID NO: 806 - DNA, 36 bp, Artificial Sequence; identical to SEQ ID NO: 14
  synthetic

SEQ ID NO: 807 - DNA, 64 bp, Artificial Sequence
  synthetic
gatttagactaccccaaaaacgaaggggactaaaaccttttttaggatgctttgtttcaggtgt

SEQ ID NO: 808 - DNA, 28 bp, Artificial Sequence
  synthetic
cttttttaggatgctttgtttcaggtgt

SEQ ID NO: 809 - DNA, 36 bp, Artificial Sequence; identical to SEQ ID NO: 14
  synthetic

SEQ ID NO: 810 - DNA, 64 bp, Artificial Sequence
  synthetic
gatttagactaccccaaaaacgaaggggactaaaacaccttttttaggatgctttgtttcaggt

SEQ ID NO: 811 - DNA, 28 bp, Artificial Sequence
  synthetic
accttttttaggatgctttgtttcaggt

SEQ ID NO: 812 - DNA, 36 bp, Artificial Sequence; identical to SEQ ID NO: 14
  synthetic

SEQ ID NO: 813 - DNA, 64 bp, Artificial Sequence
  synthetic
gatttagactaccccaaaaacgaaggggactaaaacacaccttttttaggatgctttgtttcag

SEQ ID NO: 814 - DNA, 28 bp, Artificial Sequence
  synthetic
acaccttttttaggatgctttgtttcag

SEQ ID NO: 815 - DNA, 36 bp, Artificial Sequence; identical to SEQ ID NO: 14
  synthetic

SEQ ID NO: 816 - DNA, 64 bp, Artificial Sequence
  synthetic
gatttagactaccccaaaaacgaaggggactaaaacctacaccttttttaggatgctttgtttc

SEQ ID NO: 817 - DNA, 28 bp, Artificial Sequence
  synthetic
ctacaccttttttaggatgctttgtttc

SEQ ID NO: 818 - DNA, 36 bp, Artificial Sequence; identical to SEQ ID NO: 14
  synthetic

SEQ ID NO: 819 - DNA, 64 bp, Artificial Sequence
  synthetic
gatttagactaccccaaaaacgaaggggactaaaacctctacaccttttttaggatgctttgtt

SEQ ID NO: 820 - DNA, 28 bp, Artificial Sequence
  synthetic
ctctacaccttttttaggatgctttgtt

SEQ ID NO: 821 - DNA, 36 bp, Artificial Sequence; identical to SEQ ID NO: 14
  synthetic

SEQ ID NO: 822 - DNA, 64 bp, Artificial Sequence
  synthetic
gatttagactaccccaaaaacgaaggggactaaaacttctctacaccttttttaggatgctttg

SEQ ID NO: 823 - DNA, 28 bp, Artificial Sequence
  synthetic
ttctctacaccttttttaggatgctttg

SEQ ID NO: 824 - DNA, 36 bp, Artificial Sequence; identical to SEQ ID NO: 14
  synthetic

SEQ ID NO: 825 - DNA, 64 bp, Artificial Sequence
  synthetic
gatttagactaccccaaaaacgaaggggactaaaacatttctctacaccttttttaggatgctt

SEQ ID NO: 826 - DNA, 28 bp, Artificial Sequence
  synthetic
atttctctacaccttttttaggatgctt

SEQ ID NO: 827 - DNA, 36 bp, Artificial Sequence; identical to SEQ ID NO: 14
  synthetic

SEQ ID NO: 828 - DNA, 64 bp, Artificial Sequence
  synthetic
gatttagactaccccaaaaacgaaggggactaaaacatatttctctacaccttttttaggatgc

SEQ ID NO: 829 - DNA, 28 bp, Artificial Sequence
  synthetic
atatttctctacaccttttttaggatgc

SEQ ID NO: 830 - DNA, 36 bp, Artificial Sequence; identical to SEQ ID NO: 14
  synthetic

SEQ ID NO: 831 - DNA, 64 bp, Artificial Sequence
  synthetic
gatttagactaccccaaaaacgaaggggactaaaacccatatttctctacaccttttttaggat

SEQ ID NO: 832 - DNA, 28 bp, Artificial Sequence
  synthetic
ccatatttctctacaccttttttaggat

SEQ ID NO: 833 - DNA, 36 bp, Artificial Sequence; identical to SEQ ID NO: 14
  synthetic

SEQ ID NO: 834 - DNA, 64 bp, Artificial Sequence
  synthetic
gatttagactaccccaaaaacgaaggggactaaaacgaccatatttctctacaccttttttagg

SEQ ID NO: 835 - DNA, 28 bp, Artificial Sequence
  synthetic
gaccatatttctctacaccttttttagg

SEQ ID NO: 836 - DNA, 36 bp, Artificial Sequence; identical to SEQ ID NO: 14
  synthetic

SEQ ID NO: 837 - DNA, 64 bp, Artificial Sequence
  synthetic
gatttagactaccccaaaaacgaaggggactaaaacaggaccatatttctctacacctttttta

SEQ ID NO: 838 - DNA, 28 bp, Artificial Sequence
  synthetic
aggaccatatttctctacacctttttta

SEQ ID NO: 839 - DNA, 36 bp, Artificial Sequence; identical to SEQ ID NO: 14
  synthetic

SEQ ID NO: 840 - DNA, 64 bp, Artificial Sequence
  synthetic
gatttagactaccccaaaaacgaaggggactaaaactcaggaccatatttctctacaccttttt

SEQ ID NO: 841 - DNA, 28 bp, Artificial Sequence
  synthetic
tcaggaccatatttctctacaccttttt

SEQ ID NO: 842 - DNA, 36 bp, Artificial Sequence; identical to SEQ ID NO: 14
  synthetic

SEQ ID NO: 843 - DNA, 64 bp, Artificial Sequence
  synthetic
gatttagactaccccaaaaacgaaggggactaaaaccttcaggaccatatttctctacaccttt

SEQ ID NO: 844 - DNA, 28 bp, Artificial Sequence
  synthetic
cttcaggaccatatttctctacaccttt

SEQ ID NO: 845 - DNA, 36 bp, Artificial Sequence; identical to SEQ ID NO: 14
  synthetic

SEQ ID NO: 846 - DNA, 64 bp, Artificial Sequence
  synthetic
gatttagactaccccaaaaacgaaggggactaaaactgcttcaggaccatatttctctacacct

SEQ ID NO: 847 - DNA, 28 bp, Artificial Sequence
  synthetic
tgcttcaggaccatatttctctacacct

SEQ ID NO: 848 - DNA, 36 bp, Artificial Sequence; identical to SEQ ID NO: 14
  synthetic

SEQ ID NO: 849 - DNA, 64 bp, Artificial Sequence
  synthetic
gatttagactaccccaaaaacgaaggggactaaaaccttgcttcaggaccatatttctctacac

SEQ ID NO: 850 - DNA, 28 bp, Artificial Sequence
  synthetic
cttgcttcaggaccatatttctctacac

SEQ ID NO: 851 - DNA, 36 bp, Artificial Sequence; identical to SEQ ID NO: 14
  synthetic

SEQ ID NO: 852 - DNA, 64 bp, Artificial Sequence
  synthetic
gatttagactaccccaaaaacgaaggggactaaaaccacttgcttcaggaccatatttctctac

SEQ ID NO: 853 - DNA, 28 bp, Artificial Sequence
  synthetic
cacttgcttcaggaccatatttctctac

SEQ ID NO: 854 - DNA, 36 bp, Artificial Sequence; identical to SEQ ID NO: 14
  synthetic

SEQ ID NO: 855 - DNA, 64 bp, Artificial Sequence
  synthetic
gatttagactaccccaaaaacgaaggggactaaaactgcacttgcttcaggaccatatttctct

SEQ ID NO: 856 - DNA, 28 bp, Artificial Sequence
  synthetic
tgcacttgcttcaggaccatatttctct

SEQ ID NO: 857 - DNA, 36 bp, Artificial Sequence; identical to SEQ ID NO: 14
  synthetic

SEQ ID NO: 858 - DNA, 64 bp, Artificial Sequence
  synthetic
gatttagactaccccaaaaacgaaggggactaaaacaatgcacttgcttcaggaccatatttct

SEQ ID NO: 859 - DNA, 28 bp, Artificial Sequence
  synthetic
aatgcacttgcttcaggaccatatttct

SEQ ID NO: 860 - DNA, 36 bp, Artificial Sequence; identical to SEQ ID NO: 14
  synthetic

SEQ ID NO: 861 - DNA, 64 bp, Artificial Sequence
  synthetic
gatttagactaccccaaaaacgaaggggactaaaactaaatgcacttgcttcaggaccatattt

SEQ ID NO: 862 - DNA, 28 bp, Artificial Sequence
  synthetic
taaatgcacttgcttcaggaccatattt

SEQ ID NO: 863 - DNA, 36 bp, Artificial Sequence; identical to SEQ ID NO: 14
  synthetic

SEQ ID NO: 864 - DNA, 64 bp, Artificial Sequence
  synthetic
gatttagactaccccaaaaacgaaggggactaaaacgtaaatgcacttgcttcaggaccatatt

SEQ ID NO: 865 - DNA, 28 bp, Artificial Sequence
  synthetic
gtaaatgcacttgcttcaggaccatatt

SEQ ID NO: 866 - DNA, 36 bp, Artificial Sequence; identical to SEQ ID NO: 14
  synthetic

SEQ ID NO: 867 - DNA, 64 bp, Artificial Sequence
  synthetic
gatttagactaccccaaaaacgaaggggactaaaaccgtaaatgcacttgcttcaggaccatat

SEQ ID NO: 868 - DNA, 28 bp, Artificial Sequence
  synthetic
cgtaaatgcacttgcttcaggaccatat

SEQ ID NO: 869 - DNA, 36 bp, Artificial Sequence; identical to SEQ ID NO: 14
  synthetic

SEQ ID NO: 870 - DNA, 64 bp, Artificial Sequence
  synthetic
gatttagactaccccaaaaacgaaggggactaaaactcgtaaatgcacttgcttcaggaccata

SEQ ID NO: 871 - DNA, 28 bp, Artificial Sequence
  synthetic
tcgtaaatgcacttgcttcaggaccata

SEQ ID NO: 872 - DNA, 36 bp, Artificial Sequence; identical to SEQ ID NO: 14
  synthetic

SEQ ID NO: 873 - DNA, 64 bp, Artificial Sequence
  synthetic
gatttagactaccccaaaaacgaaggggactaaaacttcgtaaatgcacttgcttcaggaccat

SEQ ID NO: 874 - DNA, 28 bp, Artificial Sequence
  synthetic
ttcgtaaatgcacttgcttcaggaccat

SEQ ID NO: 875 - DNA, 36 bp, Artificial Sequence; identical to SEQ ID NO: 14
  synthetic

SEQ ID NO: 876 - DNA, 64 bp, Artificial Sequence
  synthetic
gatttagactaccccaaaaacgaaggggactaaaactttcgtaaatgcacttgcttcaggacca

SEQ ID NO: 877 - DNA, 28 bp, Artificial Sequence
  synthetic
tttcgtaaatgcacttgcttcaggacca

SEQ ID NO: 878 - DNA, 36 bp, Artificial Sequence; identical to SEQ ID NO: 14
  synthetic

SEQ ID NO: 879 - DNA, 64 bp, Artificial Sequence
  synthetic
gatttagactaccccaaaaacgaaggggactaaaacttttcgtaaatgcacttgcttcaggacc

SEQ ID NO: 880 - DNA, 28 bp, Artificial Sequence
  synthetic
ttttcgtaaatgcacttgcttcaggacc

SEQ ID NO: 881 - DNA, 36 bp, Artificial Sequence; identical to SEQ ID NO: 14
  synthetic

SEQ ID NO: 882 - DNA, 64 bp, Artificial Sequence
  synthetic
gatttagactaccccaaaaacgaaggggactaaaactttttcgtaaatgcacttgcttcaggac

SEQ ID NO: 883 - DNA, 28 bp, Artificial Sequence
  synthetic
tttttcgtaaatgcacttgcttcaggac

SEQ ID NO: 884 - DNA, 36 bp, Artificial Sequence; identical to SEQ ID NO: 14
  synthetic

SEQ ID NO: 885 - DNA, 64 bp, Artificial Sequence
  synthetic
gatttagactaccccaaaaacgaaggggactaaaacctttttcgtaaatgcacttgcttcagga

SEQ ID NO: 886 - DNA, 28 bp, Artificial Sequence
  synthetic
ctttttcgtaaatgcacttgcttcagga

SEQ ID NO: 887 - DNA, 36 bp, Artificial Sequence; identical to SEQ ID NO: 14
  synthetic

SEQ ID NO: 888 - DNA, 64 bp, Artificial Sequence
  synthetic
gatttagactaccccaaaaacgaaggggactaaaactctttttcgtaaatgcacttgcttcagg

SEQ ID NO: 889 - DNA, 28 bp, Artificial Sequence
  synthetic
tctttttcgtaaatgcacttgcttcagg

SEQ ID NO: 890 - DNA, 36 bp, Artificial Sequence; identical to SEQ ID NO: 14
  synthetic

SEQ ID NO: 891 - DNA, 64 bp, Artificial Sequence
  synthetic
gatttagactaccccaaaaacgaaggggactaaaacatctttttcgtaaatgcacttgcttcag

SEQ ID NO: 892 - DNA, 28 bp, Artificial Sequence
  synthetic
atctttttcgtaaatgcacttgcttcag

SEQ ID NO: 893 - DNA, 36 bp, Artificial Sequence; identical to SEQ ID NO: 14
  synthetic

SEQ ID NO: 894 - DNA, 64 bp, Artificial Sequence
  synthetic
gatttagactaccccaaaaacgaaggggactaaaaccatctttttcgtaaatgcacttgcttca

SEQ ID NO: 895 - DNA, 28 bp, Artificial Sequence
  synthetic
catctttttcgtaaatgcacttgcttca

SEQ ID NO: 896 - DNA, 36 bp, Artificial Sequence; identical to SEQ ID NO: 14
  synthetic

SEQ ID NO: 897 - DNA, 64 bp, Artificial Sequence
  synthetic
gatttagactaccccaaaaacgaaggggactaaaacccatctttttcgtaaatgcacttgcttc

SEQ ID NO: 898 - DNA, 28 bp, Artificial Sequence
  synthetic
ccatctttttcgtaaatgcacttgcttc

SEQ ID NO: 899 - DNA, 36 bp, Artificial Sequence; identical to SEQ ID NO: 14
  synthetic

SEQ ID NO: 900 - DNA, 64 bp, Artificial Sequence
  synthetic
gatttagactaccccaaaaacgaaggggactaaaacaccatctttttcgtaaatgcacttgctt

SEQ ID NO: 901 - DNA, 28 bp, Artificial Sequence
  synthetic
accatctttttcgtaaatgcacttgctt

SEQ ID NO: 902 - DNA, 36 bp, Artificial Sequence; identical to SEQ ID NO: 14
  synthetic

SEQ ID NO: 903 - DNA, 64 bp, Artificial Sequence
  synthetic
gatttagactaccccaaaaacgaaggggactaaaactaccatctttttcgtaaatgcacttgct

SEQ ID NO: 904 - DNA, 28 bp, Artificial Sequence
  synthetic
taccatctttttcgtaaatgcacttgct

SEQ ID NO: 905 - DNA, 36 bp, Artificial Sequence; identical to SEQ ID NO: 14
  synthetic

SEQ ID NO: 906 - DNA, 64 bp, Artificial Sequence
  synthetic
gatttagactaccccaaaaacgaaggggactaaaacctaccatctttttcgtaaatgcacttgc

SEQ ID NO: 907 - DNA, 28 bp, Artificial Sequence
  synthetic
ctaccatctttttcgtaaatgcacttgc

SEQ ID NO: 908 - DNA, 36 bp, Artificial Sequence; identical to SEQ ID NO: 14
  synthetic

SEQ ID NO: 909 - DNA, 64 bp, Artificial Sequence
  synthetic
gatttagactaccccaaaaacgaaggggactaaaactctaccatctttttcgtaaatgcacttg

SEQ ID NO: 910 - DNA, 28 bp, Artificial Sequence
  synthetic
tctaccatctttttcgtaaatgcacttg

SEQ ID NO: 911 - DNA, 36 bp, Artificial Sequence; identical to SEQ ID NO: 14
  synthetic

SEQ ID NO: 912 - DNA, 64 bp, Artificial Sequence
  synthetic
gatttagactaccccaaaaacgaaggggactaaaacttctaccatctttttcgtaaatgcactt

SEQ ID NO: 913 - DNA, 28 bp, Artificial Sequence
  synthetic
ttctaccatctttttcgtaaatgcactt

SEQ ID NO: 914 - DNA, 36 bp, Artificial Sequence; identical to SEQ ID NO: 14
  synthetic

SEQ ID NO: 915 - DNA, 64 bp, Artificial Sequence
  synthetic
gatttagactaccccaaaaacgaaggggactaaaactttctaccatctttttcgtaaatgcact

SEQ ID NO: 916 - DNA, 28 bp, Artificial Sequence
  synthetic
tttctaccatctttttcgtaaatgcact

SEQ ID NO: 917 - DNA, 36 bp, Artificial Sequence; identical to SEQ ID NO: 14
  synthetic

SEQ ID NO: 918 - DNA, 64 bp, Artificial Sequence
  synthetic
gatttagactaccccaaaaacgaaggggactaaaacttttctaccatctttttcgtaaatgcac

SEQ ID NO: 919 - DNA, 28 bp, Artificial Sequence
  synthetic
ttttctaccatctttttcgtaaatgcac

SEQ ID NO: 920 - DNA, 36 bp, Artificial Sequence; identical to SEQ ID NO: 14
  synthetic

SEQ ID NO: 921 - DNA, 64 bp, Artificial Sequence
  synthetic
gatttagactaccccaaaaacgaaggggactaaaacattttctaccatctttttcgtaaatgca

SEQ ID NO: 922 - DNA, 28 bp, Artificial Sequence
  synthetic
attttctaccatctttttcgtaaatgca

SEQ ID NO: 923 - DNA, 36 bp, Artificial Sequence; identical to SEQ ID NO: 14
  synthetic

SEQ ID NO: 924 - DNA, 64 bp, Artificial Sequence
  synthetic
gatttagactaccccaaaaacgaaggggactaaaaccattttctaccatctttttcgtaaatgc

SEQ ID NO: 925 - DNA, 28 bp, Artificial Sequence
  synthetic
cattttctaccatctttttcgtaaatgc

SEQ ID NO: 926 - DNA, 36 bp, Artificial Sequence; identical to SEQ ID NO: 14
  synthetic

SEQ ID NO: 927 - DNA, 64 bp, Artificial Sequence
  synthetic
gatttagactaccccaaaaacgaaggggactaaaacgcattttctaccatctttttcgtaaatg

SEQ ID NO: 928 - DNA, 28 bp, Artificial Sequence
  synthetic
gcattttctaccatctttttcgtaaatg

SEQ ID NO: 929 - DNA, 36 bp, Artificial Sequence; identical to SEQ ID NO: 14
  synthetic

SEQ ID NO: 930 - DNA, 64 bp, Artificial Sequence
  synthetic
gatttagactaccccaaaaacgaaggggactaaaactgcattttctaccatctttttcgtaaat

SEQ ID NO: 931 - DNA, 28 bp, Artificial Sequence
  synthetic
tgcattttctaccatctttttcgtaaat

SEQ ID NO: 932 - DNA, 36 bp, Artificial Sequence; identical to SEQ ID NO: 14
  synthetic

SEQ ID NO: 933 - DNA, 64 bp, Artificial Sequence
  synthetic
gatttagactaccccaaaaacgaaggggactaaaacttgcattttctaccatctttttcgtaaa

SEQ ID NO: 934 - DNA, 28 bp, Artificial Sequence
  synthetic
ttgcattttctaccatctttttcgtaaa

SEQ ID NO: 935 - DNA, 36 bp, Artificial Sequence; identical to SEQ ID NO: 14
  synthetic

SEQ ID NO: 936 - DNA, 64 bp, Artificial Sequence
  synthetic
gatttagactaccccaaaaacgaaggggactaaaactttgcattttctaccatctttttcgtaa

SEQ ID NO: 937 - DNA, 28 bp, Artificial Sequence
  synthetic
tttgcattttctaccatctttttcgtaa

SEQ ID NO: 938 - DNA, 36 bp, Artificial Sequence; identical to SEQ ID NO: 14
  synthetic

SEQ ID NO: 939 - DNA, 64 bp, Artificial Sequence
  synthetic
gatttagactaccccaaaaacgaaggggactaaaacctttgcattttctaccatctttttcgta

SEQ ID NO: 940 - DNA, 28 bp, Artificial Sequence
  synthetic
ctttgcattttctaccatctttttcgta

SEQ ID NO: 941 - DNA, 36 bp, Artificial Sequence; identical to SEQ ID NO: 14
  synthetic

SEQ ID NO: 942 - DNA, 64 bp, Artificial Sequence
  synthetic
gatttagactaccccaaaaacgaaggggactaaaactctttgcattttctaccatctttttcgt

SEQ ID NO: 943 - DNA, 28 bp, Artificial Sequence
  synthetic
tctttgcattttctaccatctttttcgt

SEQ ID NO: 944 - DNA, 36 bp, Artificial Sequence; identical to SEQ ID NO: 14
  synthetic

SEQ ID NO: 945 - DNA, 64 bp, Artificial Sequence
  synthetic
gatttagactaccccaaaaacgaaggggactaaaacttctttgcattttctaccatctttttcg

SEQ ID NO: 946 - DNA, 28 bp, Artificial Sequence
  synthetic
ttctttgcattttctaccatctttttcg

SEQ ID NO: 947 - DNA, 36 bp, Artificial Sequence; identical to SEQ ID NO: 14
  synthetic

SEQ ID NO: 948 - DNA, 64 bp, Artificial Sequence
  synthetic
gatttagactaccccaaaaacgaaggggactaaaactttctttgcattttctaccatctttttc

SEQ ID NO: 949 - DNA, 28 bp, Artificial Sequence
  synthetic
tttctttgcattttctaccatctttttc

SEQ ID NO: 950 - DNA, 36 bp, Artificial Sequence; identical to SEQ ID NO: 14
  synthetic

SEQ ID NO: 951 - DNA, 64 bp, Artificial Sequence
  synthetic
gatttagactaccccaaaaacgaaggggactaaaacttttctttgcattttctaccatcttttt

SEQ ID NO: 952 - DNA, 28 bp, Artificial Sequence
  synthetic
ttttctttgcattttctaccatcttttt

SEQ ID NO: 953 - DNA, 36 bp, Artificial Sequence; identical to SEQ ID NO: 14
  synthetic

SEQ ID NO: 954 - DNA, 64 bp, Artificial Sequence
  synthetic
gatttagactaccccaaaaacgaaggggactaaaacattttctttgcattttctaccatctttt

SEQ ID NO: 955 - DNA, 28 bp, Artificial Sequence
  synthetic
attttctttgcattttctaccatctttt

SEQ ID NO: 956 - DNA, 36 bp, Artificial Sequence; identical to SEQ ID NO: 14
  synthetic

SEQ ID NO: 957 - DNA, 64 bp, Zika Virus
gatttagactaccccaaaaacgaaggggactaaaactgttgttccagtgtggagttccggtgtc

SEQ ID NO: 958 - DNA, 28 bp, Zika Virus
tgttgttccagtgtggagttccggtgtc

SEQ ID NO: 959 - DNA, 36 bp, Zika Virus; identical to SEQ ID NO: 14

SEQ ID NO: 960 - DNA, 64 bp, Zika Virus
gatttagactaccccaaaaacgaaggggactaaaacttgttgttccagtgtggagttccggtgt

SEQ ID NO: 961 - DNA, 28 bp, Zika Virus
ttgttgttccagtgtggagttccggtgt

SEQ ID NO: 962 - DNA, 36 bp, Zika Virus; identical to SEQ ID NO: 14

SEQ ID NO: 963 - DNA, 64 bp, Zika Virus
gatttagactaccccaaaaacgaaggggactaaaactttgttgttccagtgtggagttccggtg

SEQ ID NO: 964 - DNA, 28 bp, Zika Virus
tttgttgttccagtgtggagttccggtg

SEQ ID NO: 965 - DNA, 36 bp, Zika Virus; identical to SEQ ID NO: 14

SEQ ID NO: 966 - DNA, 64 bp, Zika Virus
gatttagactaccccaaaaacgaaggggactaaaacctttgttgttccagtgtggagttccggt

SEQ ID NO: 967 - DNA, 28 bp, Zika Virus
ctttgttgttccagtgtggagttccggt

SEQ ID NO: 968 - DNA, 36 bp, Zika Virus; identical to SEQ ID NO: 14

SEQ ID NO: 969 - DNA, 64 bp, Zika Virus
gatttagactaccccaaaaacgaaggggactaaaactctttgttgttccagtgtggagttccgg

SEQ ID NO: 970 - DNA, 28 bp, Zika Virus
tctttgttgttccagtgtggagttccgg

SEQ ID NO: 971 - DNA, 36 bp, Zika Virus; identical to SEQ ID NO: 14

SEQ ID NO: 972 - DNA, 64 bp, Zika Virus
gatttagactaccccaaaaacgaaggggactaaaacttctttgttgttccagtgtggagttccg

SEQ ID NO: 973 - DNA, 28 bp, Zika Virus
ttctttgttgttccagtgtggagttccg

SEQ ID NO: 974 - DNA, 36 bp, Zika Virus; identical to SEQ ID NO: 14

SEQ ID NO: 975 - DNA, 64 bp, Zika Virus
gatttagactaccccaaaaacgaaggggactaaaaccttctttgttgttccagtgtggagttcc

SEQ ID NO: 976 - DNA, 28 bp, Zika Virus
cttctttgttgttccagtgtggagttcc

SEQ ID NO: 977 - DNA, 36 bp, Zika Virus; identical to SEQ ID NO: 14

SEQ ID NO: 978 - DNA, 64 bp, Zika Virus
gatttagactaccccaaaaacgaaggggactaaaacgcttctttgttgttccagtgtggagttc

SEQ ID NO: 979 - DNA, 28 bp, Zika Virus
gcttctttgttgttccagtgtggagttc

SEQ ID NO: 980 - DNA, 36 bp, Zika Virus; identical to SEQ ID NO: 14

SEQ ID NO: 981 - DNA, 64 bp, Zika Virus
gatttagactaccccaaaaacgaaggggactaaaactgcttctttgttgttccagtgtggagtt

SEQ ID NO: 982 - DNA, 28 bp, Zika Virus
tgcttctttgttgttccagtgtggagtt

SEQ ID NO: 983 - DNA, 36 bp, Zika Virus; identical to SEQ ID NO: 14

SEQ ID NO: 984 - DNA, 64 bp, Zika Virus
gatttagactaccccaaaaacgaaggggactaaaacgtgcttctttgttgttccagtgtggagt

SEQ ID NO: 985 - DNA, 28 bp, Zika Virus
gtgcttctttgttgttccagtgtggagt

SEQ ID NO: 986 - DNA, 36 bp, Zika Virus; identical to SEQ ID NO: 14

SEQ ID NO: 987 - DNA, 64 bp, Zika Virus
gatttagactaccccaaaaacgaaggggactaaaacagtgcttctttgttgttccagtgtggag

SEQ ID NO: 988 - DNA, 28 bp, Zika Virus
agtgcttctttgttgttccagtgtggag

SEQ ID NO: 989 - DNA, 36 bp, Zika Virus; identical to SEQ ID NO: 14

SEQ ID NO: 990 - DNA, 64 bp, Zika Virus
gatttagactaccccaaaaacgaaggggactaaaaccagtgcttctttgttgttccagtgtgga

SEQ ID NO: 991 - DNA, 28 bp, Zika Virus
cagtgcttctttgttgttccagtgtgga

SEQ ID NO: 992 - DNA, 36 bp, Zika Virus; identical to SEQ ID NO: 14

SEQ ID NO: 993 - DNA, 64 bp, Zika Virus
gatttagactaccccaaaaacgaaggggactaaaacccagtgcttctttgttgttccagtgtgg

SEQ ID NO: 994 - DNA, 28 bp, Zika Virus
ccagtgcttctttgttgttccagtgtgg

SEQ ID NO: 995 - DNA, 36 bp, Zika Virus; identical to SEQ ID NO: 14

SEQ ID NO: 996 - DNA, 64 bp, Zika Virus
gatttagactaccccaaaaacgaaggggactaaaacaccagtgcttctttgttgttccagtgtg

SEQ ID NO: 997 - DNA, 28 bp, Zika Virus
accagtgcttctttgttgttccagtgtg

SEQ ID NO: 998 - DNA, 36 bp, Zika Virus; identical to SEQ ID NO: 14

SEQ ID NO: 999 - DNA, 64 bp, Zika Virus
gatttagactaccccaaaaacgaaggggactaaaactaccagtgcttctttgttgttccagtgt

SEQ ID NO: 1000 - DNA, 28 bp, Zika Virus
taccagtgcttctttgttgttccagtgt

SEQ ID NO: 1001 - DNA, 36 bp, Zika Virus; identical to SEQ ID NO: 14

SEQ ID NO: 1002 - DNA, 64 bp, Zika Virus
gatttagactaccccaaaaacgaaggggactaaaacctaccagtgcttctttgttgttccagtg

SEQ ID NO: 1003 - DNA, 28 bp, Zika Virus
ctaccagtgcttctttgttgttccagtg

SEQ ID NO: 1004 - DNA, 36 bp, Zika Virus; identical to SEQ ID NO: 14

SEQ ID NO: 1005 - DNA, 64 bp, Zika Virus
gatttagactaccccaaaaacgaaggggactaaaactctaccagtgcttctttgttgttccagt

SEQ ID NO: 1006 - DNA, 28 bp, Zika Virus
tctaccagtgcttctttgttgttccagt

SEQ ID NO: 1007 - DNA, 36 bp, Zika Virus; identical to SEQ ID NO: 14

SEQ ID NO: 1008 - DNA, 64 bp, Zika Virus
gatttagactaccccaaaaacgaaggggactaaaacctctaccagtgcttctttgttgttccag

SEQ ID NO: 1009 - DNA, 28 bp, Zika Virus
ctctaccagtgcttctttgttgttccag

SEQ ID NO: 1010 - DNA, 36 bp, Zika Virus; identical to SEQ ID NO: 14

SEQ ID NO: 1011 - DNA, 64 bp, Zika Virus
gatttagactaccccaaaaacgaaggggactaaaacactctaccagtgcttctttgttgttcca

SEQ ID NO: 1012 - DNA, 28 bp, Zika Virus
actctaccagtgcttctttgttgttcca

SEQ ID NO: 1013 - DNA, 36 bp, Zika Virus; identical to SEQ ID NO: 14

SEQ ID NO: 1014 - DNA, 64 bp, Zika Virus
gatttagactaccccaaaaacgaaggggactaaaacaactctaccagtgcttctttgttgttcc

SEQ ID NO: 1015 - DNA, 28 bp, Zika Virus
aactctaccagtgcttctttgttgttcc

SEQ ID NO: 1016 - DNA, 36 bp, Zika Virus; identical to SEQ ID NO: 14

SEQ ID NO: 1017 - DNA, 64 bp, Zika Virus
gatttagactaccccaaaaacgaaggggactaaaactgaactctaccagtgcttctttgttgtt

SEQ ID NO: 1018 - DNA, 28 bp, Zika Virus
tgaactctaccagtgcttctttgttgtt

SEQ ID NO: 1019 - DNA, 36 bp, Zika Virus; identical to SEQ ID NO: 14

SEQ ID NO: 1020 - DNA, 64 bp, Zika Virus
gatttagactaccccaaaaacgaaggggactaaaaccttgaactctaccagtgcttctttgttg

SEQ ID NO: 1021 - DNA, 28 bp, Zika Virus
cttgaactctaccagtgcttctttgttg

SEQ ID NO: 1022 - DNA, 36 bp, Zika Virus; identical to SEQ ID NO: 14

SEQ ID NO: 1023 - DNA, 64 bp, Zika Virus
gatttagactaccccaaaaacgaaggggactaaaactccttgaactctaccagtgcttctttgt

SEQ ID NO: 1024 - DNA, 28 bp, Zika Virus
tccttgaactctaccagtgcttctttgt

SEQ ID NO: 1025 - DNA, 36 bp, Zika Virus; identical to SEQ ID NO: 14

SEQ ID NO: 1026 - DNA, 64 bp, Zika Virus
gatttagactaccccaaaaacgaaggggactaaaaccgtccttgaactctaccagtgcttcttt

SEQ ID NO: 1027 - DNA, 28 bp, Zika Virus
cgtccttgaactctaccagtgcttcttt

SEQ ID NO: 1028 - DNA, 36 bp, Zika Virus; identical to SEQ ID NO: 14

SEQ ID NO: 1029 - DNA, 64 bp, Zika Virus
gatttagactaccccaaaaacgaaggggactaaaactgcgtccttgaactctaccagtgcttct

SEQ ID NO: 1030 - DNA, 28 bp, Zika Virus
tgcgtccttgaactctaccagtgcttct

SEQ ID NO: 1031 - DNA, 36 bp, Zika Virus; identical to SEQ ID NO: 14

SEQ ID NO: 1032 - DNA, 64 bp, Zika Virus
gatttagactaccccaaaaacgaaggggactaaaactgtgcgtccttgaactctaccagtgctt

SEQ ID NO: 1033 - DNA, 28 bp, Zika Virus
tgtgcgtccttgaactctaccagtgctt

SEQ ID NO: 1034 - DNA, 36 bp, Zika Virus; identical to SEQ ID NO: 14

SEQ ID NO: 1035 - DNA, 64 bp, Zika Virus
gatttagactaccccaaaaacgaaggggactaaaaccatgtgcgtccttgaactctaccagtgc

SEQ ID NO: 1036 - DNA, 28 bp, Zika Virus
catgtgcgtccttgaactctaccagtgc

SEQ ID NO: 1037 - DNA, 36 bp, Zika Virus; identical to SEQ ID NO: 14

SEQ ID NO: 1038 - DNA, 64 bp, Zika Virus
gatttagactaccccaaaaacgaaggggactaaaacggcatgtgcgtccttgaactctaccagt

SEQ ID NO: 1039 - DNA, 28 bp, Zika Virus
ggcatgtgcgtccttgaactctaccagt

SEQ ID NO: 1040 - DNA, 36 bp, Zika Virus; identical to SEQ ID NO: 14

SEQ ID NO: 1041 - DNA, 64 bp, Zika Virus
gatttagactaccccaaaaacgaaggggactaaaacttggcatgtgcgtccttgaactctacca

SEQ ID NO: 1042 - DNA, 28 bp, Zika Virus
ttggcatgtgcgtccttgaactctacca

SEQ ID NO: 1043 - DNA, 36 bp, Zika Virus; identical to SEQ ID NO: 14

SEQ ID NO: 1044 - DNA, 64 bp, Zika Virus
gatttagactaccccaaaaacgaaggggactaaaacttttggcatgtgcgtccttgaactctac

SEQ ID NO: 1045 - DNA, 28 bp, Zika Virus
ttttggcatgtgcgtccttgaactctac

SEQ ID NO: 1046 - DNA, 36 bp, Zika Virus; identical to SEQ ID NO: 14

SEQ ID NO: 1047 - DNA, 64 bp, Zika Virus
gatttagactaccccaaaaacgaaggggactaaaacccttttggcatgtgcgtccttgaactct

SEQ ID NO: 1048 - DNA, 28 bp, Zika Virus
ccttttggcatgtgcgtccttgaactct

SEQ ID NO: 1049 - DNA, 36 bp, Zika Virus; identical to SEQ ID NO: 14

SEQ ID NO: 1050 - DNA, 64 bp, Zika Virus
gatttagactaccccaaaaacgaaggggactaaaactgccttttggcatgtgcgtccttgaact

SEQ ID NO: 1051 - DNA, 28 bp, Zika Virus
tgccttttggcatgtgcgtccttgaact

SEQ ID NO: 1052 - DNA, 36 bp, Zika Virus; identical to SEQ ID NO: 14

SEQ ID NO: 1053 - DNA, 64 bp, Zika Virus
gatttagactaccccaaaaacgaaggggactaaaactttgccttttggcatgtgcgtccttgaa

SEQ ID NO: 1054 - DNA, 28 bp, Zika Virus
tttgccttttggcatgtgcgtccttgaa

SEQ ID NO: 1055 - DNA, 36 bp, Zika Virus; identical to SEQ ID NO: 14

SEQ ID NO: 1056 - DNA, 64 bp, Zika Virus
gatttagactaccccaaaaacgaaggggactaaaacagtttgccttttggcatgtgcgtccttg

SEQ ID NO: 1057 - DNA, 28 bp, Zika Virus
agtttgccttttggcatgtgcgtccttg

SEQ ID NO: 1058 - DNA, 36 bp, Zika Virus; identical to SEQ ID NO: 14

SEQ ID NO: 1059 - DNA, 64 bp, Zika Virus
gatttagactaccccaaaaacgaaggggactaaaacacagtttgccttttggcatgtgcgtcct

SEQ ID NO: 1060 - DNA, 28 bp, Zika Virus
acagtttgccttttggcatgtgcgtcct

SEQ ID NO: 1061 - DNA, 36 bp, Zika Virus; identical to SEQ ID NO: 14

SEQ ID NO: 1062 - DNA, 64 bp, Zika Virus
gatttagactaccccaaaaacgaaggggactaaaaccgacagtttgccttttggcatgtgcgtc

SEQ ID NO: 1063 - DNA, 28 bp, Zika Virus
cgacagtttgccttttggcatgtgcgtc

SEQ ID NO: 1064 - DNA, 36 bp, Zika Virus; identical to SEQ ID NO: 14

SEQ ID NO: 1065 - DNA, 64 bp, Zika Virus
gatttagactaccccaaaaacgaaggggactaaaaccacgacagtttgccttttggcatgtgcg

SEQ ID NO: 1066 - DNA, 28 bp, Zika Virus
cacgacagtttgccttttggcatgtgcg

SEQ ID NO: 1067 - DNA, 36 bp, Zika Virus; identical to SEQ ID NO: 14

SEQ ID NO: 1068 - DNA, 64 bp, Zika Virus
gatttagactaccccaaaaacgaaggggactaaaacaccacgacagtttgccttttggcatgtg

SEQ ID NO: 1069 - DNA, 28 bp, Zika Virus
accacgacagtttgccttttggcatgtg

SEQ ID NO: 1070 - DNA, 36 bp, Zika Virus; identical to SEQ ID NO: 14

SEQ ID NO: 1071 - DNA, 64 bp, Zika Virus
gatttagactaccccaaaaacgaaggggactaaaacgaaccacgacagtttgccttttggcatg

SEQ ID NO: 1072 - DNA, 28 bp, Zika Virus
gaaccacgacagtttgccttttggcatg

SEQ ID NO: 1073 - DNA, 36 bp, Zika Virus; identical to SEQ ID NO: 14

SEQ ID NO: 1074 - DNA, 64 bp, Zika Virus
gatttagactaccccaaaaacgaaggggactaaaactagaaccacgacagtttgccttttggca

SEQ ID NO: 1075 - DNA, 28 bp, Zika Virus
tagaaccacgacagtttgccttttggca

SEQ ID NO: 1076 - DNA, 36 bp, Zika Virus; identical to SEQ ID NO: 14

SEQ ID NO: 1077 - DNA, 64 bp, Zika Virus
gatttagactaccccaaaaacgaaggggactaaaaccctagaaccacgacagtttgccttttgg

SEQ ID NO: 1078 - DNA, 28 bp, Zika Virus
cctagaaccacgacagtttgccttttgg

SEQ ID NO: 1079 - DNA, 36 bp, Zika Virus; identical to SEQ ID NO: 14

SEQ ID NO: 1080 - DNA, 64 bp, Zika Virus
gatttagactaccccaaaaacgaaggggactaaaactccctagaaccacgacagtttgcctttt

SEQ ID NO: 1081 - DNA, 28 bp, Zika Virus
tccctagaaccacgacagtttgcctttt

SEQ ID NO: 1082 - DNA, 36 bp, Zika Virus; identical to SEQ ID NO: 14

SEQ ID NO: 1083 - DNA, 64 bp, Zika Virus
gatttagactaccccaaaaacgaaggggactaaaacactccctagaaccacgacagtttgcctt

SEQ ID NO: 1084 - DNA, 28 bp, Zika Virus
actccctagaaccacgacagtttgcctt

SEQ ID NO: 1085 - DNA, 36 bp, Zika Virus; identical to SEQ ID NO: 14

SEQ ID NO: 1086 - DNA, 64 bp, Zika Virus
gatttagactaccccaaaaacgaaggggactaaaactgactccctagaaccacgacagtttgcc

SEQ ID NO: 1087 - DNA, 28 bp, Zika Virus
tgactccctagaaccacgacagtttgcc

SEQ ID NO: 1088 - DNA, 36 bp, Zika Virus; identical to SEQ ID NO: 14

SEQ ID NO: 1089 - DNA, 64 bp, Zika Virus
gatttagactaccccaaaaacgaaggggactaaaaccttgactccctagaaccacgacagtttg

SEQ ID NO: 1090 - DNA, 28 bp, Zika Virus
cttgactccctagaaccacgacagtttg

SEQ ID NO: 1091 - DNA, 36 bp, Zika Virus; identical to SEQ ID NO: 14

SEQ ID NO: 1092 - DNA, 64 bp, Zika Virus
gatttagactaccccaaaaacgaaggggactaaaacttcttgactccctagaaccacgacagtt

SEQ ID NO: 1093 - DNA, 28 bp, Zika Virus
ttcttgactccctagaaccacgacagtt

SEQ ID NO: 1094 - DNA, 36 bp, Zika Virus; identical to SEQ ID NO: 14

SEQ ID NO: 1095 - DNA, 64 bp, Zika Virus
gatttagactaccccaaaaacgaaggggactaaaacccttcttgactccctagaaccacgacag

SEQ ID NO: 1096 - DNA, 28 bp, Zika Virus
ccttcttgactccctagaaccacgacag

SEQ ID NO: 1097 - DNA, 36 bp, Zika Virus; identical to SEQ ID NO: 14

SEQ ID NO: 1098 - DNA, 64 bp, Zika Virus
gatttagactaccccaaaaacgaaggggactaaaacctccttcttgactccctagaaccacgac

SEQ ID NO: 1099 - DNA, 28 bp, Zika Virus
ctccttcttgactccctagaaccacgac

SEQ ID NO: 1100 - DNA, 36 bp, Zika Virus; identical to SEQ ID NO: 14

SEQ ID NO: 1101 - DNA, 64 bp, Zika Virus
gatttagactaccccaaaaacgaaggggactaaaactgctccttcttgactccctagaaccacg

SEQ ID NO: 1102 - DNA, 28 bp, Zika Virus
tgctccttcttgactccctagaaccacg

SEQ ID NO: 1103 - DNA, 36 bp, Zika Virus; identical to SEQ ID NO: 14

SEQ ID NO: 1104 - DNA, 64 bp, Zika Virus
gatttagactaccccaaaaacgaaggggactaaaacactgctccttcttgactccctagaacca

SEQ ID NO: 1105 - DNA, 28 bp, Zika Virus
actgctccttcttgactccctagaacca

SEQ ID NO: 1106 - DNA, 36 bp, Zika Virus; identical to SEQ ID NO: 14

SEQ ID NO: 1107 - DNA, 64 bp, Zika Virus
gatttagactaccccaaaaacgaaggggactaaaacgaactgctccttcttgactccctagaac

SEQ ID NO: 1108 - DNA, 28 bp, Zika Virus
gaactgctccttcttgactccctagaac

SEQ ID NO: 1109 - DNA, 36 bp, Zika Virus; identical to SEQ ID NO: 14

SEQ ID NO: 1110 - DNA, 64 bp, Zika Virus
gatttagactaccccaaaaacgaaggggactaaaacgtgaactgctccttcttgactccctaga

SEQ ID NO: 1111 - DNA, 28 bp, Zika Virus
gtgaactgctccttcttgactccctaga

SEQ ID NO: 1112 - DNA, 36 bp, Zika Virus; identical to SEQ ID NO: 14

SEQ ID NO: 1113 - DNA, 64 bp, Zika Virus
gatttagactaccccaaaaacgaaggggactaaaacgtgtgaactgctccttcttgactcccta

SEQ ID NO: 1114 - DNA, 28 bp, Zika Virus
gtgtgaactgctccttcttgactcccta

SEQ ID NO: 1115 - DNA, 36 bp, Zika Virus; identical to SEQ ID NO: 14

SEQ ID NO: 1116 - DNA, 64 bp, Zika Virus
gatttagactaccccaaaaacgaaggggactaaaacccgtgtgaactgctccttcttgactccc

SEQ ID NO: 1117 - DNA, 28 bp, Zika Virus
ccgtgtgaactgctccttcttgactccc

SEQ ID NO: 1118 - DNA, 36 bp, Zika Virus; identical to SEQ ID NO: 14

SEQ ID NO: 1119 - DNA, 64 bp, Zika Virus
gatttagactaccccaaaaacgaaggggactaaaacggccgtgtgaactgctccttcttgactc

SEQ ID NO: 1120 - DNA, 28 bp, Zika Virus
ggccgtgtgaactgctccttcttgactc

SEQ ID NO: 1121 - DNA, 36 bp, Zika Virus; identical to SEQ ID NO: 14

SEQ ID NO: 1122 - DNA, 64 bp, Zika Virus
gatttagactaccccaaaaacgaaggggactaaaacagggccgtgtgaactgctccttcttgac

SEQ ID NO: 1123 - DNA, 28 bp, Zika Virus
agggccgtgtgaactgctccttcttgac

SEQ ID NO: 1124 - DNA, 36 bp, Zika Virus; identical to SEQ ID NO: 14

SEQ ID NO: 1125 - DNA, 64 bp, Zika Virus
gatttagactaccccaaaaacgaaggggactaaaaccaagggccgtgtgaactgctccttcttg

SEQ ID NO: 1126 - DNA, 28 bp, Zika Virus
caagggccgtgtgaactgctccttcttg

SEQ ID NO: 1127 - DNA, 36 bp, Zika Virus; identical to SEQ ID NO: 14

SEQ ID NO: 1128 - DNA, 64 bp, Zika Virus
gatttagactaccccaaaaacgaaggggactaaaacagcaagggccgtgtgaactgctccttct

SEQ ID NO: 1129 - DNA, 28 bp, Zika Virus
agcaagggccgtgtgaactgctccttct

SEQ ID NO: 1130 - DNA, 36 bp, Zika Virus; identical to SEQ ID NO: 14

SEQ ID NO: 1131 - DNA, 64 bp, Zika Virus
gatttagactaccccaaaaacgaaggggactaaaacccagcaagggccgtgtgaactgctcctt

SEQ ID NO: 1132 - DNA, 28 bp, Zika Virus
ccagcaagggccgtgtgaactgctcctt

SEQ ID NO: 1133 - DNA, 36 bp, Zika Virus; identical to SEQ ID NO: 14

SEQ ID NO: 1134 - DNA, 64 bp, Zika Virus
gatttagactaccccaaaaacgaaggggactaaaacctccagcaagggccgtgtgaactgctcc

SEQ ID NO: 1135 - DNA, 28 bp, Zika Virus
ctccagcaagggccgtgtgaactgctcc

SEQ ID NO: 1136 - DNA, 36 bp, Zika Virus; identical to SEQ ID NO: 14

SEQ ID NO: 1137 - DNA, 64 bp, Zika Virus
gatttagactaccccaaaaacgaaggggactaaaacagctccagcaagggccgtgtgaactgct

SEQ ID NO: 1138 - DNA, 28 bp, Zika Virus
agctccagcaagggccgtgtgaactgct

SEQ ID NO: 1139 - DNA, 36 bp, Zika Virus; identical to SEQ ID NO: 14

SEQ ID NO: 1140 - DNA, 64 bp, Zika Virus
gatttagactaccccaaaaacgaaggggactaaaacagagctccagcaagggccgtgtgaactg

SEQ ID NO: 1141 - DNA, 28 bp, Zika Virus
agagctccagcaagggccgtgtgaactg

SEQ ID NO: 1142 - DNA, 36 bp, Zika Virus; identical to SEQ ID NO: 14

SEQ ID NO: 1143 - DNA, 64 bp, Zika Virus
gatttagactaccccaaaaacgaaggggactaaaacccagagctccagcaagggccgtgtgaac

SEQ ID NO: 1144 - DNA, 28 bp, Zika Virus
ccagagctccagcaagggccgtgtgaac

SEQ ID NO: 1145 - DNA, 36 bp, Zika Virus; identical to SEQ ID NO: 14

SEQ ID NO: 1146 - DNA, 64 bp, Zika Virus
gatttagactaccccaaaaacgaaggggactaaaacctccagagctccagcaagggccgtgtga

SEQ ID NO: 1147 - DNA, 28 bp, Zika Virus
ctccagagctccagcaagggccgtgtga

SEQ ID NO: 1148 - DNA, 36 bp, Zika Virus; identical to SEQ ID NO: 14

SEQ ID NO: 1149 - DNA, 64 bp, Zika Virus
gatttagactaccccaaaaacgaaggggactaaaacgcctccagagctccagcaagggccgtgt

SEQ ID NO: 1150 - DNA, 28 bp, Zika Virus
gcctccagagctccagcaagggccgtgt

SEQ ID NO: 1151 - DNA, 36 bp, Zika Virus; identical to SEQ ID NO: 14

SEQ ID NO: 1152 - DNA, 64 bp, Zika Virus
gatttagactaccccaaaaacgaaggggactaaaaccagcctccagagctccagcaagggccgt

SEQ ID NO: 1153 - DNA, 28 bp, Zika Virus
cagcctccagagctccagcaagggccgt

SEQ ID NO: 1154 - DNA, 36 bp, Zika Virus; identical to SEQ ID NO: 14

SEQ ID NO: 1155 - DNA, 64 bp, Zika Virus
gatttagactaccccaaaaacgaaggggactaaaacctcagcctccagagctccagcaagggcc

SEQ ID NO: 1156 - DNA, 28 bp, Zika Virus
ctcagcctccagagctccagcaagggcc

SEQ ID NO: 1157 - DNA, 36 bp, Zika Virus; identical to SEQ ID NO: 14

SEQ ID NO: 1158 - DNA, 64 bp, Zika Virus
gatttagactaccccaaaaacgaaggggactaaaacatctcagcctccagagctccagcaaggg

SEQ ID NO: 1159 - DNA, 28 bp, Zika Virus
atctcagcctccagagctccagcaaggg

SEQ ID NO: 1160 - DNA, 36 bp, Zika Virus; identical to SEQ ID NO: 14

SEQ ID NO: 1161 - DNA, 64 bp, Zika Virus
gatttagactaccccaaaaacgaaggggactaaaaccatctcagcctccagagctccagcaagg

SEQ ID NO: 1162 - DNA, 28 bp, Zika Virus
catctcagcctccagagctccagcaagg

SEQ ID NO: 1163 - DNA, 36 bp, Zika Virus; identical to SEQ ID NO: 14

SEQ ID NO: 1164 - DNA, 64 bp, Zika Virus
gatttagactaccccaaaaacgaaggggactaaaacccatctcagcctccagagctccagcaag

SEQ ID NO: 1165 - DNA, 28 bp, Zika Virus
ccatctcagcctccagagctccagcaag

SEQ ID NO: 1166 - DNA, 36 bp, Zika Virus; identical to SEQ ID NO: 14

SEQ ID NO: 1167 - DNA, 64 bp, Zika Virus
gatttagactaccccaaaaacgaaggggactaaaactccatctcagcctccagagctccagcaa

SEQ ID NO: 1168 - DNA, 28 bp, Zika Virus
tccatctcagcctccagagctccagcaa

SEQ ID NO: 1169 - DNA, 36 bp, Zika Virus; identical to SEQ ID NO: 14

SEQ ID NO: 1170 - DNA, 64 bp, Zika Virus
gatttagactaccccaaaaacgaaggggactaaaacatccatctcagcctccagagctccagca

SEQ ID NO: 1171 - DNA, 28 bp, Zika Virus
atccatctcagcctccagagctccagca

SEQ ID NO: 1172 - DNA, 36 bp, Zika Virus; identical to SEQ ID NO: 14

SEQ ID NO: 1173 - DNA, 64 bp, Zika Virus
gatttagactaccccaaaaacgaaggggactaaaaccatccatctcagcctccagagctccagc

SEQ ID NO: 1174 - DNA, 28 bp, Zika Virus
catccatctcagcctccagagctccagc

SEQ ID NO: 1175 - DNA, 36 bp, Zika Virus; identical to SEQ ID NO: 14

SEQ ID NO: 1176 - DNA, 64 bp, Zika Virus
gatttagactaccccaaaaacgaaggggactaaaacccatccatctcagcctccagagctccag

SEQ ID NO: 1177 - DNA, 28 bp, Zika Virus
ccatccatctcagcctccagagctccag

SEQ ID NO: 1178 - DNA, 36 bp, Zika Virus; identical to SEQ ID NO: 14

SEQ ID NO: 1179 - DNA, 64 bp, Zika Virus
gatttagactaccccaaaaacgaaggggactaaaacaccatccatctcagcctccagagctcca

SEQ ID NO: 1180 - DNA, 28 bp, Zika Virus
accatccatctcagcctccagagctcca

SEQ ID NO: 1181 - DNA, 36 bp, Zika Virus; identical to SEQ ID NO: 14

SEQ ID NO: 1182 - DNA, 64 bp, Zika Virus
gatttagactaccccaaaaacgaaggggactaaaaccaccatccatctcagcctccagagctcc

SEQ ID NO: 1183 - DNA, 28 bp, Zika Virus
caccatccatctcagcctccagagctcc

SEQ ID NO: 1184 - DNA, 36 bp, Zika Virus; identical to SEQ ID NO: 14

SEQ ID NO: 1185 - DNA, 64 bp, Zika Virus
gatttagactaccccaaaaacgaaggggactaaaacgcaccatccatctcagcctccagagctc

SEQ ID NO: 1186 - DNA, 28 bp, Zika Virus
gcaccatccatctcagcctccagagctc

SEQ ID NO: 1187 - DNA, 36 bp, Zika Virus; identical to SEQ ID NO: 14

SEQ ID NO: 1188 - DNA, 64 bp, Zika Virus
gatttagactaccccaaaaacgaaggggactaaaactgcaccatccatctcagcctccagagct

SEQ ID NO: 1189 - DNA, 28 bp, Zika Virus
tgcaccatccatctcagcctccagagct

SEQ ID NO: 1190 - DNA, 36 bp, Zika Virus; identical to SEQ ID NO: 14

SEQ ID NO: 1191 - DNA, 64 bp, Zika Virus
gatttagactaccccaaaaacgaaggggactaaaacttgcaccatccatctcagcctccagagc

SEQ ID NO: 1192 - DNA, 28 bp, Zika Virus
ttgcaccatccatctcagcctccagagc

SEQ ID NO: 1193 - DNA, 36 bp, Zika Virus; identical to SEQ ID NO: 14

SEQ ID NO: 1194 - DNA, 64 bp, Zika Virus
gatttagactaccccaaaaacgaaggggactaaaactttgcaccatccatctcagcctccagag

SEQ ID NO: 1195 - DNA, 28 bp, Zika Virus
tttgcaccatccatctcagcctccagag

SEQ ID NO: 1196 - DNA, 36 bp, Zika Virus; identical to SEQ ID NO: 14

SEQ ID NO: 1197 - DNA, 64 bp, Zika Virus
gatttagactaccccaaaaacgaaggggactaaaacctttgcaccatccatctcagcctccaga

SEQ ID NO: 1198 - DNA, 28 bp, Zika Virus
ctttgcaccatccatctcagcctccaga

SEQ ID NO: 1199 - DNA, 36 bp, Zika Virus; identical to SEQ ID NO: 14

SEQ ID NO: 1200 - DNA, 64 bp, Zika Virus
gatttagactaccccaaaaacgaaggggactaaaaccctttgcaccatccatctcagcctccag

SEQ ID NO: 1201 - DNA, 28 bp, Zika Virus
cctttgcaccatccatctcagcctccag

SEQ ID NO: 1202 - DNA, 36 bp, Zika Virus; identical to SEQ ID NO: 14

SEQ ID NO: 1203 - DNA, 64 bp, Zika Virus
gatttagactaccccaaaaacgaaggggactaaaacccctttgcaccatccatctcagcctcca

SEQ ID NO: 1204 - DNA, 28 bp, Zika Virus
ccctttgcaccatccatctcagcctcca

SEQ ID NO: 1205 - DNA, 36 bp, Zika Virus; identical to SEQ ID NO: 14

SEQ ID NO: 1206 - DNA, 64 bp, Zika Virus
gatttagactaccccaaaaacgaaggggactaaaactccctttgcaccatccatctcagcctcc

SEQ ID NO: 1207 - DNA, 28 bp, Zika Virus
tccctttgcaccatccatctcagcctcc

SEQ ID NO: 1208 - DNA, 36 bp, Zika Virus; identical to SEQ ID NO: 14

SEQ ID NO: 1209 - DNA, 64 bp, Zika Virus
gatttagactaccccaaaaacgaaggggactaaaacttccctttgcaccatccatctcagcctc

SEQ ID NO: 1210 - DNA, 28 bp, Zika Virus
ttccctttgcaccatccatctcagcctc

SEQ ID NO: 1211 - DNA, 36 bp, Zika Virus; identical to SEQ ID NO: 14

SEQ ID NO: 1212 - DNA, 64 bp, Zika Virus
gatttagactaccccaaaaacgaaggggactaaaaccttccctttgcaccatccatctcagcct

SEQ ID NO: 1213 - DNA, 28 bp, Zika Virus
cttccctttgcaccatccatctcagcct

SEQ ID NO: 1214 - DNA, 36 bp, Zika Virus; identical to SEQ ID NO: 14

SEQ ID NO: 1215 - DNA, 64 bp, Zika Virus
gatttagactaccccaaaaacgaaggggactaaaacccttccctttgcaccatccatctcagcc

SEQ ID NO: 1216 - DNA, 28 bp, Zika Virus
ccttccctttgcaccatccatctcagcc

SEQ ID NO: 1217 - DNA, 36 bp, Zika Virus; identical to SEQ ID NO: 14

SEQ ID NO: 1218 - DNA, 64 bp, Zika Virus
gatttagactaccccaaaaacgaaggggactaaaacgccttccctttgcaccatccatctcagc

SEQ ID NO: 1219 - DNA, 28 bp, Zika Virus
gccttccctttgcaccatccatctcagc

SEQ ID NO: 1220 - DNA, 36 bp, Zika Virus; identical to SEQ ID NO: 14

SEQ ID NO: 1221 - DNA, 64 bp, Zika Virus
gatttagactaccccaaaaacgaaggggactaaaacagccttccctttgcaccatccatctcag

SEQ ID NO: 1222 - DNA, 28 bp, Zika Virus
agccttccctttgcaccatccatctcag

SEQ ID NO: 1223 - DNA, 36 bp, Zika Virus; identical to SEQ ID NO: 14

SEQ ID NO: 1224 - DNA, 64 bp, Zika Virus
gatttagactaccccaaaaacgaaggggactaaaaccagccttccctttgcaccatccatctca

SEQ ID NO: 1225 - DNA, 28 bp, Zika Virus
cagccttccctttgcaccatccatctca

SEQ ID NO: 1226 - DNA, 36 bp, Zika Virus; identical to SEQ ID NO: 14

SEQ ID NO: 1227 - DNA, 64 bp, Zika Virus
gatttagactaccccaaaaacgaaggggactaaaacacagccttccctttgcaccatccatctc

SEQ ID NO: 1228 - DNA, 28 bp, Zika Virus
acagccttccctttgcaccatccatctc

SEQ ID NO: 1229 - DNA, 36 bp, Zika Virus; identical to SEQ ID NO: 14

SEQ ID NO: 1230 - DNA, 64 bp, Zika Virus
gatttagactaccccaaaaacgaaggggactaaaacgacagccttccctttgcaccatccatct

SEQ ID NO: 1231 - DNA, 28 bp, Zika Virus
gacagccttccctttgcaccatccatct

SEQ ID NO: 1232 - DNA, 36 bp, Zika Virus; identical to SEQ ID NO: 14

SEQ ID NO: 1233 - DNA, 64 bp, Zika Virus
gatttagactaccccaaaaacgaaggggactaaaacggacagccttccctttgcaccatccatc

SEQ ID NO: 1234 - DNA, 28 bp, Zika Virus
ggacagccttccctttgcaccatccatc

SEQ ID NO: 1235 - DNA, 36 bp, Zika Virus; identical to SEQ ID NO: 14

SEQ ID NO: 1236 - DNA, 64 bp, Zika Virus
gatttagactaccccaaaaacgaaggggactaaaacaggacagccttccctttgcaccatccat

SEQ ID NO: 1237 - DNA, 28 bp, Zika Virus
aggacagccttccctttgcaccatccat

SEQ ID NO: 1238 - DNA, 36 bp, Zika Virus; identical to SEQ ID NO: 14

SEQ ID NO: 1239 - DNA, 64 bp, Zika Virus
gatttagactaccccaaaaacgaaggggactaaaacgaggacagccttccctttgcaccatcca

SEQ ID NO: 1240 - DNA, 28 bp, Zika Virus
gaggacagccttccctttgcaccatcca

SEQ ID NO: 1241 - DNA, 36 bp, Zika Virus; identical to SEQ ID NO: 14

SEQ ID NO: 1242 - DNA, 66 bp, Zika Virus
tttgttgttccagtgtggagttccggtgtcgttggaactgctctcattttggagggtaatcacaac

SEQ ID NO: 1243 - DNA, 30 bp, Zika Virus
tttgttgttccagtgtggagttccggtgtc

SEQ ID NO: 1244 - DNA, 36 bp, Zika Virus
gttggaactgctctcattttggagggtaatcacaac

SEQ ID NO: 1245 - DNA, 66 bp, Zika Virus
ctttgttgttccagtgtggagttccggtgtgttggaactgctctcattttggagggtaatcacaac

SEQ ID NO: 1246 - DNA, 30 bp, Zika Virus
ctttgttgttccagtgtggagttccggtgt

SEQ ID NO: 1247 - DNA, 36 bp, Zika Virus; identical to SEQ ID NO: 1244

SEQ ID NO: 1248 - DNA, 66 bp, Zika Virus
tctttgttgttccagtgtggagttccggtggttggaactgctctcattttggagggtaatcacaac

SEQ ID NO: 1249 - DNA, 30 bp, Zika Virus
tctttgttgttccagtgtggagttccggtg

SEQ ID NO: 1250 - DNA, 36 bp, Zika Virus; identical to SEQ ID NO: 1244

SEQ ID NO: 1251 - DNA, 66 bp, Zika Virus
ttctttgttgttccagtgtggagttccggtgttggaactgctctcattttggagggtaatcacaac

SEQ ID NO: 1252 - DNA, 30 bp, Zika Virus
ttctttgttgttccagtgtggagttccggt

SEQ ID NO: 1253 - DNA, 36 bp, Zika Virus; identical to SEQ ID NO: 1244

SEQ ID NO: 1254 - DNA, 66 bp, Zika Virus
cttctttgttgttccagtgtggagttccgggttggaactgctctcattttggagggtaatcacaac

SEQ ID NO: 1255 - DNA, 30 bp, Zika Virus
cttctttgttgttccagtgtggagttccgg

SEQ ID NO: 1256 - DNA, 36 bp, Zika Virus; identical to SEQ ID NO: 1244

SEQ ID NO: 1257 - DNA, 66 bp, Zika Virus
gcttctttgttgttccagtgtggagttccggttggaactgctctcattttggagggtaatcacaac

SEQ ID NO: 1258 - DNA, 30 bp, Zika Virus
gcttctttgttgttccagtgtggagttccg

SEQ ID NO: 1259 - DNA, 36 bp, Zika Virus; identical to SEQ ID NO: 1244

SEQ ID NO: 1260 - DNA, 66 bp, Zika Virus
tgcttctttgttgttccagtgtggagttccgttggaactgctctcattttggagggtaatcacaac

SEQ ID NO: 1261 - DNA, 30 bp, Zika Virus
tgcttctttgttgttccagtgtggagttcc

SEQ ID NO: 1262 - DNA, 36 bp, Zika Virus; identical to SEQ ID NO: 1244

SEQ ID NO: 1263 - DNA, 66 bp, Zika Virus
gtgcttctttgttgttccagtgtggagttcgttggaactgctctcattttggagggtaatcacaac

SEQ ID NO: 1264 - DNA, 30 bp, Zika Virus
gtgcttctttgttgttccagtgtggagttc

SEQ ID NO: 1265 - DNA, 36 bp, Zika Virus; identical to SEQ ID NO: 1244

SEQ ID NO: 1266 - DNA, 66 bp, Zika Virus
agtgcttctttgttgttccagtgtggagttgttggaactgctctcattttggagggtaatcacaac

SEQ ID NO: 1267 - DNA, 30 bp, Zika Virus
agtgcttctttgttgttccagtgtggagtt

SEQ ID NO: 1268 - DNA, 36 bp, Zika Virus; identical to SEQ ID NO: 1244

SEQ ID NO: 1269 - DNA, 66 bp, Zika Virus
cagtgcttctttgttgttccagtgtggagtgttggaactgctctcattttggagggtaatcacaac

SEQ ID NO: 1270 - DNA, 30 bp, Zika Virus
cagtgcttctttgttgttccagtgtggagt

SEQ ID NO: 1271 - DNA, 36 bp, Zika Virus; identical to SEQ ID NO: 1244

SEQ ID NO: 1272 - DNA, 66 bp, Zika Virus
ccagtgcttctttgttgttccagtgtggaggttggaactgctctcattttggagggtaatcacaac

SEQ ID NO: 1273 - DNA, 30 bp, Zika Virus
ccagtgcttctttgttgttccagtgtggag

SEQ ID NO: 1274 - DNA, 36 bp, Zika Virus; identical to SEQ ID NO: 1244

SEQ ID NO: 1275 - DNA, 66 bp, Zika Virus
accagtgcttctttgttgttccagtgtggagttggaactgctctcattttggagggtaatcacaac

SEQ ID NO: 1276 - DNA, 30 bp, Zika Virus
accagtgcttctttgttgttccagtgtgga

SEQ ID NO: 1277 - DNA, 36 bp, Zika Virus; identical to SEQ ID NO: 1244

SEQ ID NO: 1278 - DNA, 66 bp, Zika Virus
taccagtgcttctttgttgttccagtgtgggttggaactgctctcattttggagggtaatcacaac

SEQ ID NO: 1279 - DNA, 30 bp, Zika Virus
taccagtgcttctttgttgttccagtgtgg

SEQ ID NO: 1280 - DNA, 36 bp, Zika Virus; identical to SEQ ID NO: 1244

SEQ ID NO: 1281 - DNA, 66 bp, Zika Virus
ctaccagtgcttctttgttgttccagtgtggttggaactgctctcattttggagggtaatcacaac

SEQ ID NO: 1282 - DNA, 30 bp, Zika Virus
ctaccagtgcttctttgttgttccagtgtg

SEQ ID NO: 1283 - DNA, 36 bp, Zika Virus; identical to SEQ ID NO: 1244

SEQ ID NO: 1284 - DNA, 66 bp, Zika Virus
tctaccagtgcttctttgttgttccagtgtgttggaactgctctcattttggagggtaatcacaac

SEQ ID NO: 1285 - DNA, 30 bp, Zika Virus
tctaccagtgcttctttgttgttccagtgt

SEQ ID NO: 1286 - DNA, 36 bp, Zika Virus; identical to SEQ ID NO: 1244

SEQ ID NO: 1287 - DNA, 66 bp, Zika Virus
ctctaccagtgcttctttgttgttccagtggttggaactgctctcattttggagggtaatcacaac

SEQ ID NO: 1288 - DNA, 30 bp, Zika Virus
ctctaccagtgcttctttgttgttccagtg

SEQ ID NO: 1289 - DNA, 36 bp, Zika Virus; identical to SEQ ID NO: 1244

SEQ ID NO: 1290 - DNA, 66 bp, Zika Virus
actctaccagtgcttctttgttgttccagtgttggaactgctctcattttggagggtaatcacaac

SEQ ID NO: 1291 - DNA, 30 bp, Zika Virus
actctaccagtgcttctttgttgttccagt

SEQ ID NO: 1292 - DNA, 36 bp, Zika Virus; identical to SEQ ID NO: 1244

SEQ ID NO: 1293 - DNA, 66 bp, Zika Virus
aactctaccagtgcttctttgttgttccaggttggaactgctctcattttggagggtaatcacaac

SEQ ID NO: 1294 - DNA, 30 bp, Zika Virus
aactctaccagtgcttctttgttgttccag

SEQ ID NO: 1295 - DNA, 36 bp, Zika Virus; identical to SEQ ID NO: 1244

SEQ ID NO: 1296 - DNA, 66 bp, Zika Virus
gaactctaccagtgcttctttgttgttccagttggaactgctctcattttggagggtaatcacaac

SEQ ID NO: 1297 - DNA, 30 bp, Zika Virus
gaactctaccagtgcttctttgttgttcca

SEQ ID NO: 1298 - DNA, 36 bp, Zika Virus; identical to SEQ ID NO: 1244

SEQ ID NO: 1299 - DNA, 66 bp, Zika Virus
tgaactctaccagtgcttctttgttgttccgttggaactgctctcattttggagggtaatcacaac

SEQ ID NO: 1300 - DNA, 30 bp, Zika Virus
tgaactctaccagtgcttctttgttgttcc

SEQ ID NO: 1301 - DNA, 36 bp, Zika Virus; identical to SEQ ID NO: 1244

SEQ ID NO: 1302 - DNA, 66 bp, Zika Virus
cttgaactctaccagtgcttctttgttgttgttggaactgctctcattttggagggtaatcacaac

SEQ ID NO: 1303 - DNA, 30 bp, Zika Virus
cttgaactctaccagtgcttctttgttgtt

SEQ ID NO: 1304 - DNA, 36 bp, Zika Virus; identical to SEQ ID NO: 1244

SEQ ID NO: 1305 - DNA, 66 bp, Zika Virus
tccttgaactctaccagtgcttctttgttggttggaactgctctcattttggagggtaatcacaac

SEQ ID NO: 1306 - DNA, 30 bp, Zika Virus
tccttgaactctaccagtgcttctttgttg

SEQ ID NO: 1307 - DNA, 36 bp, Zika Virus; identical to SEQ ID NO: 1244

SEQ ID NO: 1308 - DNA, 66 bp, Zika Virus
cgtccttgaactctaccagtgcttctttgtgttggaactgctctcattttggagggtaatcacaac

SEQ ID NO: 1309 - DNA, 30 bp, Zika Virus
cgtccttgaactctaccagtgcttctttgt

SEQ ID NO: 1310 - DNA, 36 bp, Zika Virus; identical to SEQ ID NO: 1244

SEQ ID NO: 1311 - DNA, 66 bp, Zika Virus
tgcgtccttgaactctaccagtgcttctttgttggaactgctctcattttggagggtaatcacaac

SEQ ID NO: 1312 - DNA, 30 bp, Zika Virus
tgcgtccttgaactctaccagtgcttcttt

SEQ ID NO: 1313 - DNA, 36 bp, Zika Virus; identical to SEQ ID NO: 1244

SEQ ID NO: 1314 - DNA, 66 bp, Zika Virus
tgtgcgtccttgaactctaccagtgcttctgttggaactgctctcattttggagggtaatcacaac

SEQ ID NO: 1315 - DNA, 30 bp, Zika Virus
tgtgcgtccttgaactctaccagtgcttct

SEQ ID NO: 1316 - DNA, 36 bp, Zika Virus; identical to SEQ ID NO: 1244

SEQ ID NO: 1317 - DNA, 66 bp, Zika Virus
catgtgcgtccttgaactctaccagtgcttgttggaactgctctcattttggagggtaatcacaac

SEQ ID NO: 1318 - DNA, 30 bp, Zika Virus
catgtgcgtccttgaactctaccagtgctt

SEQ ID NO: 1319 - DNA, 36 bp, Zika Virus; identical to SEQ ID NO: 1244

SEQ ID NO: 1320 - DNA, 66 bp, Zika Virus
ggcatgtgcgtccttgaactctaccagtgcgttggaactgctctcattttggagggtaatcacaac

SEQ ID NO: 1321 - DNA, 30 bp, Zika Virus
ggcatgtgcgtccttgaactctaccagtgc

SEQ ID NO: 1322 - DNA, 36 bp, Zika Virus; identical to SEQ ID NO: 1244

SEQ ID NO: 1323 - DNA, 66 bp, Zika Virus
ttggcatgtgcgtccttgaactctaccagtgttggaactgctctcattttggagggtaatcacaac

SEQ ID NO: 1324 - DNA, 30 bp, Zika Virus
ttggcatgtgcgtccttgaactctaccagt

SEQ ID NO: 1325 - DNA, 36 bp, Zika Virus; identical to SEQ ID NO: 1244

SEQ ID NO: 1326 - DNA, 66 bp, Zika Virus
ttttggcatgtgcgtccttgaactctaccagttggaactgctctcattttggagggtaatcacaac

SEQ ID NO: 1327 - DNA, 30 bp, Zika Virus
ttttggcatgtgcgtccttgaactctacca

SEQ ID NO: 1328 - DNA, 36 bp, Zika Virus; identical to SEQ ID NO: 1244

SEQ ID NO: 1329 - DNA, 66 bp, Zika Virus
ccttttggcatgtgcgtccttgaactctacgttggaactgctctcattttggagggtaatcacaac

SEQ ID NO: 1330 - DNA, 30 bp, Zika Virus
ccttttggcatgtgcgtccttgaactctac

SEQ ID NO: 1331 - DNA, 36 bp, Zika Virus; identical to SEQ ID NO: 1244

SEQ ID NO: 1332 - DNA, 66 bp, Zika Virus
tgccttttggcatgtgcgtccttgaactctgttggaactgctctcattttggagggtaatcacaac

SEQ ID NO: 1333 - DNA, 30 bp, Zika Virus
tgccttttggcatgtgcgtccttgaactct

SEQ ID NO: 1334 - DNA, 36 bp, Zika Virus; identical to SEQ ID NO: 1244

SEQ ID NO: 1335 - DNA, 66 bp, Zika Virus
tttgccttttggcatgtgcgtccttgaactgttggaactgctctcattttggagggtaatcacaac

SEQ ID NO: 1336 - DNA, 30 bp, Zika Virus
tttgccttttggcatgtgcgtccttgaact

SEQ ID NO: 1337 - DNA, 36 bp, Zika Virus; identical to SEQ ID NO: 1244

SEQ ID NO: 1338 - DNA, 66 bp, Zika Virus
agtttgccttttggcatgtgcgtccttgaagttggaactgctctcattttggagggtaatcacaac

SEQ ID NO: 1339 - DNA, 30 bp, Zika Virus
agtttgccttttggcatgtgcgtccttgaa

SEQ ID NO: 1340 - DNA, 36 bp, Zika Virus; identical to SEQ ID NO: 1244

SEQ ID NO: 1341 - DNA, 66 bp, Zika Virus
acagtttgccttttggcatgtgcgtccttggttggaactgctctcattttggagggtaatcacaac

SEQ ID NO: 1342 - DNA, 30 bp, Zika Virus
acagtttgccttttggcatgtgcgtccttg

SEQ ID NO: 1343 - DNA, 36 bp, Zika Virus; identical to SEQ ID NO: 1244

SEQ ID NO: 1344 - DNA, 66 bp, Zika Virus
cgacagtttgccttttggcatgtgcgtcctgttggaactgctctcattttggagggtaatcacaac

SEQ ID NO: 1345 - DNA, 30 bp, Zika Virus
cgacagtttgccttttggcatgtgcgtcct

SEQ ID NO: 1346 - DNA, 36 bp, Zika Virus; identical to SEQ ID NO: 1244

SEQ ID NO: 1347 - DNA, 66 bp, Zika Virus
cacgacagtttgccttttggcatgtgcgtcgttggaactgctctcattttggagggtaatcacaac

SEQ ID NO: 1348 - DNA, 30 bp, Zika Virus
cacgacagtttgccttttggcatgtgcgtc

SEQ ID NO: 1349 - DNA, 36 bp, Zika Virus; identical to SEQ ID NO: 1244

SEQ ID NO: 1350 - DNA, 66 bp, Zika Virus
accacgacagtttgccttttggcatgtgcggttggaactgctctcattttggagggtaatcacaac

SEQ ID NO: 1351 - DNA, 30 bp, Zika Virus
accacgacagtttgccttttggcatgtgcg

SEQ ID NO: 1352 - DNA, 36 bp, Zika Virus; identical to SEQ ID NO: 1244

SEQ ID NO: 1353 - DNA, 66 bp, Zika Virus
gaaccacgacagtttgccttttggcatgtggttggaactgctctcattttggagggtaatcacaac

SEQ ID NO: 1354 - DNA, 30 bp, Zika Virus
gaaccacgacagtttgccttttggcatgtg

SEQ ID NO: 1355 - DNA, 36 bp, Zika Virus; identical to SEQ ID NO: 1244

SEQ ID NO: 1356 - DNA, 66 bp, Zika Virus
tagaaccacgacagtttgccttttggcatggttggaactgctctcattttggagggtaatcacaac

SEQ ID NO: 1357 - DNA, 30 bp, Zika Virus
tagaaccacgacagtttgccttttggcatg

SEQ ID NO: 1358 - DNA, 36 bp, Zika Virus; identical to SEQ ID NO: 1244

SEQ ID NO: 1359 - DNA, 66 bp, Zika Virus
cctagaaccacgacagtttgccttttggcagttggaactgctctcattttggagggtaatcacaac

SEQ ID NO: 1360 - DNA, 30 bp, Zika Virus
cctagaaccacgacagtttgccttttggca

SEQ ID NO: 1361 - DNA, 36 bp, Zika Virus; identical to SEQ ID NO: 1244

SEQ ID NO: 1362 - DNA, 66 bp, Zika Virus
tccctagaaccacgacagtttgccttttgggttggaactgctctcattttggagggtaatcacaac

SEQ ID NO: 1363 - DNA, 30 bp, Zika Virus
tccctagaaccacgacagtttgccttttgg

SEQ ID NO: 1364 - DNA, 36 bp, Zika Virus; identical to SEQ ID NO: 1244

SEQ ID NO: 1365 - DNA, 66 bp, Zika Virus
actccctagaaccacgacagtttgccttttgttggaactgctctcattttggagggtaatcacaac

SEQ ID NO: 1366 - DNA, 30 bp, Zika Virus
actccctagaaccacgacagtttgcctttt

SEQ ID NO: 1367 - DNA, 36 bp, Zika Virus; identical to SEQ ID NO: 1244

SEQ ID NO: 1368 - DNA, 66 bp, Zika Virus
tgactccctagaaccacgacagtttgccttgttggaactgctctcattttggagggtaatcacaac

SEQ ID NO: 1369 - DNA, 30 bp, Zika Virus
tgactccctagaaccacgacagtttgcctt

SEQ ID NO: 1370 - DNA, 36 bp, Zika Virus; identical to SEQ ID NO: 1244

SEQ ID NO: 1371 - DNA, 66 bp, Zika Virus
cttgactccctagaaccacgacagtttgccgttggaactgctctcattttggagggtaatcacaac

SEQ ID NO: 1372 - DNA, 30 bp, Zika Virus
cttgactccctagaaccacgacagtttgcc

SEQ ID NO: 1373 - DNA, 36 bp, Zika Virus; identical to SEQ ID NO: 1244

SEQ ID NO: 1374 - DNA, 66 bp, Zika Virus
ttcttgactccctagaaccacgacagtttggttggaactgctctcattttggagggtaatcacaac

SEQ ID NO: 1375 - DNA, 30 bp, Zika Virus
ttcttgactccctagaaccacgacagtttg

SEQ ID NO: 1376 - DNA, 36 bp, Zika Virus; identical to SEQ ID NO: 1244

SEQ ID NO: 1377 - DNA, 66 bp, Zika Virus
ccttcttgactccctagaaccacgacagttgttggaactgctctcattttggagggtaatcacaac

SEQ ID NO: 1378 - DNA, 30 bp, Zika Virus
ccttcttgactccctagaaccacgacagtt

SEQ ID NO: 1379 - DNA, 36 bp, Zika Virus; identical to SEQ ID NO: 1244

SEQ ID NO: 1380 - DNA, 66 bp, Zika Virus
ctccttcttgactccctagaaccacgacaggttggaactgctctcattttggagggtaatcacaac

SEQ ID NO: 1381 - DNA, 30 bp, Zika Virus
ctccttcttgactccctagaaccacgacag

SEQ ID NO: 1382 - DNA, 36 bp, Zika Virus; identical to SEQ ID NO: 1244

SEQ ID NO: 1383 - DNA, 66 bp, Zika Virus
tgctccttcttgactccctagaaccacgacgttggaactgctctcattttggagggtaatcacaac

SEQ ID NO: 1384 - DNA, 30 bp, Zika Virus
tgctccttcttgactccctagaaccacgac

SEQ ID NO: 1385 - DNA, 36 bp, Zika Virus; identical to SEQ ID NO: 1244

SEQ ID NO: 1386 - DNA, 66 bp, Zika Virus
actgctccttcttgactccctagaaccacggttggaactgctctcattttggagggtaatcacaac

SEQ ID NO: 1387 - DNA, 30 bp, Zika Virus
actgctccttcttgactccctagaaccacg

SEQ ID NO: 1388 - DNA, 36 bp, Zika Virus; identical to SEQ ID NO: 1244

SEQ ID NO: 1389 - DNA, 66 bp, Zika Virus
gaactgctccttcttgactccctagaaccagttggaactgctctcattttggagggtaatcacaac

SEQ ID NO: 1390 - DNA, 30 bp, Zika Virus
gaactgctccttcttgactccctagaacca

SEQ ID NO: 1391 - DNA, 36 bp, Zika Virus; identical to SEQ ID NO: 1244

SEQ ID NO: 1392 - DNA, 66 bp, Zika Virus
gtgaactgctccttcttgactccctagaacgttggaactgctctcattttggagggtaatcacaac

SEQ ID NO: 1393 - DNA, 30 bp, Zika Virus
gtgaactgctccttcttgactccctagaac

SEQ ID NO: 1394 - DNA, 36 bp, Zika Virus; identical to SEQ ID NO: 1244

SEQ ID NO: 1395 - DNA, 66 bp, Zika Virus
gtgtgaactgctccttcttgactccctagagttggaactgctctcattttggagggtaatcacaac

SEQ ID NO: 1396 - DNA, 30 bp, Zika Virus
gtgtgaactgctccttcttgactccctaga

SEQ ID NO: 1397 - DNA, 36 bp, Zika Virus; identical to SEQ ID NO: 1244

SEQ ID NO: 1398 - DNA, 66 bp, Zika Virus
ccgtgtgaactgctccttcttgactccctagttggaactgctctcattttggagggtaatcacaac

SEQ ID NO: 1399 - DNA, 30 bp, Zika Virus
ccgtgtgaactgctccttcttgactcccta

SEQ ID NO: 1400 - DNA, 36 bp, Zika Virus; identical to SEQ ID NO: 1244

SEQ ID NO: 1401 - DNA, 66 bp, Zika Virus
ggccgtgtgaactgctccttcttgactcccgttggaactgctctcattttggagggtaatcacaac

SEQ ID NO: 1402 - DNA, 30 bp, Zika Virus
ggccgtgtgaactgctccttcttgactccc

SEQ ID NO: 1403 - DNA, 36 bp, Zika Virus; identical to SEQ ID NO: 1244

SEQ ID NO: 1404 - DNA, 66 bp, Zika Virus
agggccgtgtgaactgctccttcttgactcgttggaactgctctcattttggagggtaatcacaac

SEQ ID NO: 1405 - DNA, 30 bp, Zika Virus
agggccgtgtgaactgctccttcttgactc

SEQ ID NO: 1406 - DNA, 36 bp, Zika Virus; identical to SEQ ID NO: 1244

SEQ ID NO: 1407 - DNA, 66 bp, Zika Virus
caagggccgtgtgaactgctccttcttgacgttggaactgctctcattttggagggtaatcacaac

SEQ ID NO: 1408 - DNA, 30 bp, Zika Virus
caagggccgtgtgaactgctccttcttgac

SEQ ID NO: 1409 - DNA, 36 bp, Zika Virus; identical to SEQ ID NO: 1244

SEQ ID NO: 1410 - DNA, 66 bp, Zika Virus
agcaagggccgtgtgaactgctccttcttggttggaactgctctcattttggagggtaatcacaac

SEQ ID NO: 1411 - DNA, 30 bp, Zika Virus
agcaagggccgtgtgaactgctccttcttg

SEQ ID NO: 1412 - DNA, 36 bp, Zika Virus; identical to SEQ ID NO: 1244

SEQ ID NO: 1413 - DNA, 66 bp, Zika Virus
ccagcaagggccgtgtgaactgctccttctgttggaactgctctcattttggagggtaatcacaac

SEQ ID NO: 1414 - DNA, 30 bp, Zika Virus
ccagcaagggccgtgtgaactgctccttct

SEQ ID NO: 1415 - DNA, 36 bp, Zika Virus; identical to SEQ ID NO: 1244

SEQ ID NO: 1416 - DNA, 66 bp, Zika Virus
ctccagcaagggccgtgtgaactgctccttgttggaactgctctcattttggagggtaatcacaac

SEQ ID NO: 1417 - DNA, 30 bp, Zika Virus
ctccagcaagggccgtgtgaactgctcctt

SEQ ID NO: 1418 - DNA, 36 bp, Zika Virus; identical to SEQ ID NO: 1244

SEQ ID NO: 1419 - DNA, 66 bp, Zika Virus
agctccagcaagggccgtgtgaactgctccgttggaactgctctcattttggagggtaatcacaac

SEQ ID NO: 1420 - DNA, 30 bp, Zika Virus
agctccagcaagggccgtgtgaactgctcc

SEQ ID NO: 1421 - DNA, 36 bp, Zika Virus; identical to SEQ ID NO: 1244

SEQ ID NO: 1422 - DNA, 66 bp, Zika Virus
agagctccagcaagggccgtgtgaactgctgttggaactgctctcattttggagggtaatcacaac

SEQ ID NO: 1423 - DNA, 30 bp, Zika Virus
agagctccagcaagggccgtgtgaactgct

SEQ ID NO: 1424 - DNA, 36 bp, Zika Virus; identical to SEQ ID NO: 1244

SEQ ID NO: 1425 - DNA, 66 bp, Zika Virus
ccagagctccagcaagggccgtgtgaactggttggaactgctctcattttggagggtaatcacaac

SEQ ID NO: 1426 - DNA, 30 bp, Zika Virus
ccagagctccagcaagggccgtgtgaactg

SEQ ID NO: 1427 - DNA, 36 bp, Zika Virus; identical to SEQ ID NO: 1244

SEQ ID NO: 1428 - DNA, 66 bp, Zika Virus
ctccagagctccagcaagggccgtgtgaacgttggaactgctctcattttggagggtaatcacaac

SEQ ID NO: 1429 - DNA, 30 bp, Zika Virus
ctccagagctccagcaagggccgtgtgaac

SEQ ID NO: 1430 - DNA, 36 bp, Zika Virus; identical to SEQ ID NO: 1244

SEQ ID NO: 1431 - DNA, 66 bp, Zika Virus
gcctccagagctccagcaagggccgtgtgagttggaactgctctcattttggagggtaatcacaac

SEQ ID NO: 1432 - DNA, 30 bp, Zika Virus
gcctccagagctccagcaagggccgtgtga

SEQ ID NO: 1433 - DNA, 36 bp, Zika Virus; identical to SEQ ID NO: 1244

SEQ ID NO: 1434 - DNA, 66 bp, Zika Virus
cagcctccagagctccagcaagggccgtgtgttggaactgctctcattttggagggtaatcacaac

SEQ ID NO: 1435 - DNA, 30 bp, Zika Virus
cagcctccagagctccagcaagggccgtgt

SEQ ID NO: 1436 - DNA, 36 bp, Zika Virus; identical to SEQ ID NO: 1244

SEQ ID NO: 1437 - DNA, 66 bp, Zika Virus
ctcagcctccagagctccagcaagggccgtgttggaactgctctcattttggagggtaatcacaac

SEQ ID NO: 1438 - DNA, 30 bp, Zika Virus
ctcagcctccagagctccagcaagggccgt

SEQ ID NO: 1439 - DNA, 36 bp, Zika Virus; identical to SEQ ID NO: 1244

SEQ ID NO: 1440 - DNA, 66 bp, Zika Virus
atctcagcctccagagctccagcaagggccgttggaactgctctcattttggagggtaatcacaac

SEQ ID NO: 1441 - DNA, 30 bp, Zika Virus
atctcagcctccagagctccagcaagggcc

SEQ ID NO: 1442 - DNA, 36 bp, Zika Virus; identical to SEQ ID NO: 1244

SEQ ID NO: 1443 - DNA, 66 bp, Zika Virus
ccatctcagcctccagagctccagcaaggggttggaactgctctcattttggagggtaatcacaac

SEQ ID NO: 1444 - DNA, 30 bp, Zika Virus
ccatctcagcctccagagctccagcaaggg

SEQ ID NO: 1445 - DNA, 36 bp, Zika Virus; identical to SEQ ID NO: 1244

SEQ ID NO: 1446 - DNA, 66 bp, Zika Virus
tccatctcagcctccagagctccagcaagggttggaactgctctcattttggagggtaatcacaac

SEQ ID NO: 1447 - DNA, 30 bp, Zika Virus
tccatctcagcctccagagctccagcaagg

SEQ ID NO: 1448 - DNA, 36 bp, Zika Virus; identical to SEQ ID NO: 1244

SEQ ID NO: 1449 - DNA, 66 bp, Zika Virus
atccatctcagcctccagagctccagcaaggttggaactgctctcattttggagggtaatcacaac

SEQ ID NO: 1450 - DNA, 30 bp, Zika Virus
atccatctcagcctccagagctccagcaag

SEQ ID NO: 1451 - DNA, 36 bp, Zika Virus; identical to SEQ ID NO: 1244

SEQ ID NO: 1452 - DNA, 66 bp, Zika Virus
catccatctcagcctccagagctccagcaagttggaactgctctcattttggagggtaatcacaac

SEQ ID NO: 1453 - DNA, 30 bp, Zika Virus
catccatctcagcctccagagctccagcaa

SEQ ID NO: 1454 - DNA, 36 bp, Zika Virus; identical to SEQ ID NO: 1244

SEQ ID NO: 1455 - DNA, 66 bp, Zika Virus
ccatccatctcagcctccagagctccagcagttggaactgctctcattttggagggtaatcacaac

SEQ ID NO: 1456 - DNA, 30 bp, Zika Virus
ccatccatctcagcctccagagctccagca

SEQ ID NO: 1457 - DNA, 36 bp, Zika Virus; identical to SEQ ID NO: 1244

SEQ ID NO: 1458 - DNA, 66 bp, Zika Virus
accatccatctcagcctccagagctccagcgttggaactgctctcattttggagggtaatcacaac

SEQ ID NO: 1459 - DNA, 30 bp, Zika Virus
accatccatctcagcctccagagctccagc

SEQ ID NO: 1460 - DNA, 36 bp, Zika Virus; identical to SEQ ID NO: 1244

SEQ ID NO: 1461 - DNA, 66 bp, Zika Virus
caccatccatctcagcctccagagctccaggttggaactgctctcattttggagggtaatcacaac

SEQ ID NO: 1462 - DNA, 30 bp, Zika Virus
caccatccatctcagcctccagagctccag

SEQ ID NO: 1463 - DNA, 36 bp, Zika Virus; identical to SEQ ID NO: 1244

SEQ ID NO: 1464 - DNA, 66 bp, Zika Virus
gcaccatccatctcagcctccagagctccagttggaactgctctcattttggagggtaatcacaac

SEQ ID NO: 1465 - DNA, 30 bp, Zika Virus
gcaccatccatctcagcctccagagctcca

SEQ ID NO: 1466 - DNA, 36 bp, Zika Virus; identical to SEQ ID NO: 1244

SEQ ID NO: 1467 - DNA, 66 bp, Zika Virus
tgcaccatccatctcagcctccagagctccgttggaactgctctcattttggagggtaatcacaac

SEQ ID NO: 1468 - DNA, 30 bp, Zika Virus
tgcaccatccatctcagcctccagagctcc

SEQ ID NO: 1469 - DNA, 36 bp, Zika Virus; identical to SEQ ID NO: 1244

SEQ ID NO: 1470 - DNA, 66 bp, Zika Virus
ttgcaccatccatctcagcctccagagctcgttggaactgctctcattttggagggtaatcacaac

SEQ ID NO: 1471 - DNA, 30 bp, Zika Virus
ttgcaccatccatctcagcctccagagctc

SEQ ID NO: 1472 - DNA, 36 bp, Zika Virus; identical to SEQ ID NO: 1244

SEQ ID NO: 1473 - DNA, 66 bp, Zika Virus
tttgcaccatccatctcagcctccagagctgttggaactgctctcattttggagggtaatcacaac

SEQ ID NO: 1474 - DNA, 30 bp, Zika Virus
tttgcaccatccatctcagcctccagagct

SEQ ID NO: 1475 - DNA, 36 bp, Zika Virus; identical to SEQ ID NO: 1244

SEQ ID NO: 1476 - DNA, 66 bp, Zika Virus
ctttgcaccatccatctcagcctccagagcgttggaactgctctcattttggagggtaatcacaac

SEQ ID NO: 1477 - DNA, 30 bp, Zika Virus
ctttgcaccatccatctcagcctccagagc

SEQ ID NO: 1478 - DNA, 36 bp, Zika Virus; identical to SEQ ID NO: 1244

SEQ ID NO: 1479 - DNA, 66 bp, Zika Virus
cctttgcaccatccatctcagcctccagaggttggaactgctctcattttggagggtaatcacaac

SEQ ID NO: 1480 - DNA, 30 bp, Zika Virus
cctttgcaccatccatctcagcctccagag

SEQ ID NO: 1481 - DNA, 36 bp, Zika Virus; identical to SEQ ID NO: 1244

SEQ ID NO: 1482 - DNA, 66 bp, Zika Virus
ccctttgcaccatccatctcagcctccagagttggaactgctctcattttggagggtaatcacaac

SEQ ID NO: 1483 - DNA, 30 bp, Zika Virus
ccctttgcaccatccatctcagcctccaga

SEQ ID NO: 1484 - DNA, 36 bp, Zika Virus; identical to SEQ ID NO: 1244

SEQ ID NO: 1485 - DNA, 66 bp, Zika Virus
tccctttgcaccatccatctcagcctccaggttggaactgctctcattttggagggtaatcacaac

SEQ ID NO: 1486 - DNA, 30 bp, Zika Virus
tccctttgcaccatccatctcagcctccag

SEQ ID NO: 1487 - DNA, 36 bp, Zika Virus; identical to SEQ ID NO: 1244

SEQ ID NO: 1488 - DNA, 66 bp, Zika Virus
ttccctttgcaccatccatctcagcctccagttggaactgctctcattttggagggtaatcacaac

SEQ ID NO: 1489 - DNA, 30 bp, Zika Virus
ttccctttgcaccatccatctcagcctcca

SEQ ID NO: 1490 - DNA, 36 bp, Zika Virus; identical to SEQ ID NO: 1244

SEQ ID NO: 1491 - DNA, 66 bp, Zika Virus
cttccctttgcaccatccatctcagcctccgttggaactgctctcattttggagggtaatcacaac

SEQ ID NO: 1492 - DNA, 30 bp, Zika Virus
cttccctttgcaccatccatctcagcctcc

SEQ ID NO: 1493 - DNA, 36 bp, Zika Virus; identical to SEQ ID NO: 1244

SEQ ID NO: 1494 - DNA, 66 bp, Zika Virus
ccttccctttgcaccatccatctcagcctcgttggaactgctctcattttggagggtaatcacaac

SEQ ID NO: 1495 - DNA, 30 bp, Zika Virus
ccttccctttgcaccatccatctcagcctc

SEQ ID NO: 1496 - DNA, 36 bp, Zika Virus; identical to SEQ ID NO: 1244

SEQ ID NO: 1497 - DNA, 66 bp, Zika Virus
gccttccctttgcaccatccatctcagcctgttggaactgctctcattttggagggtaatcacaac

SEQ ID NO: 1498 - DNA, 30 bp, Zika Virus
gccttccctttgcaccatccatctcagcct

SEQ ID NO: 1499 - DNA, 36 bp, Zika Virus; identical to SEQ ID NO: 1244

SEQ ID NO: 1500 - DNA, 66 bp, Zika Virus
agccttccctttgcaccatccatctcagccgttggaactgctctcattttggagggtaatcacaac

SEQ ID NO: 1501 - DNA, 30 bp, Zika Virus
agccttccctttgcaccatccatctcagcc

SEQ ID NO: 1502 - DNA, 36 bp, Zika Virus; identical to SEQ ID NO: 1244

SEQ ID NO: 1503 - DNA, 66 bp, Zika Virus
cagccttccctttgcaccatccatctcagcgttggaactgctctcattttggagggtaatcacaac

SEQ ID NO: 1504 - DNA, 30 bp, Zika Virus
cagccttccctttgcaccatccatctcagc

SEQ ID NO: 1505 - DNA, 36 bp, Zika Virus; identical to SEQ ID NO: 1244

SEQ ID NO: 1506 - DNA, 66 bp, Zika Virus
acagccttccctttgcaccatccatctcaggttggaactgctctcattttggagggtaatcacaac

SEQ ID NO: 1507 - DNA, 30 bp, Zika Virus
acagccttccctttgcaccatccatctcag

SEQ ID NO: 1508 - DNA, 36 bp, Zika Virus; identical to SEQ ID NO: 1244

SEQ ID NO: 1509 - DNA, 66 bp, Zika Virus
gacagccttccctttgcaccatccatctcagttggaactgctctcattttggagggtaatcacaac

SEQ ID NO: 1510 - DNA, 30 bp, Zika Virus
gacagccttccctttgcaccatccatctca

SEQ ID NO: 1511 - DNA, 36 bp, Zika Virus; identical to SEQ ID NO: 1244

SEQ ID NO: 1512 - DNA, 66 bp, Zika Virus
ggacagccttccctttgcaccatccatctcgttggaactgctctcattttggagggtaatcacaac

SEQ ID NO: 1513 - DNA, 30 bp, Zika Virus
ggacagccttccctttgcaccatccatctc

SEQ ID NO: 1514 - DNA, 36 bp, Zika Virus; identical to SEQ ID NO: 1244

SEQ ID NO: 1515 - DNA, 66 bp, Zika Virus
aggacagccttccctttgcaccatccatctgttggaactgctctcattttggagggtaatcacaac

SEQ ID NO: 1516 - DNA, 30 bp, Zika Virus
aggacagccttccctttgcaccatccatct

SEQ ID NO: 1517 - DNA, 36 bp, Zika Virus; identical to SEQ ID NO: 1244

SEQ ID NO: 1518 - DNA, 66 bp, Zika Virus
gaggacagccttccctttgcaccatccatcgttggaactgctctcattttggagggtaatcacaac

SEQ ID NO: 1519 - DNA, 30 bp, Zika Virus
gaggacagccttccctttgcaccatccatc

SEQ ID NO: 1520 - DNA, 36 bp, Zika Virus; identical to SEQ ID NO: 1244

SEQ ID NO: 1521 - DNA, 66 bp, Zika Virus
agaggacagccttccctttgcaccatccatgttggaactgctctcattttggagggtaatcacaac

SEQ ID NO: 1522 - DNA, 30 bp, Zika Virus
agaggacagccttccctttgcaccatccat

SEQ ID NO: 1523 - DNA, 36 bp, Zika Virus; identical to SEQ ID NO: 1244

SEQ ID NO: 1524 - DNA, 66 bp, Zika Virus
cagaggacagccttccctttgcaccatccagttggaactgctctcattttggagggtaatcacaac

SEQ ID NO: 1525 - DNA, 30 bp, Zika Virus
cagaggacagccttccctttgcaccatcca

SEQ ID NO: 1526 - DNA, 72 bp, Zika Virus
gttgttggaactgctctcattttggagggtaatcacaacggaactgctctcattttggagggtaatcacaac

SEQ ID NO: 1527 - DNA, 66 bp, Dengue Virus
tgttgagaggttggcccctgaatatgtactgttggaactgctctcattttggagggtaatcacaac

SEQ ID NO: 1528 - DNA, 30 bp, Dengue Virus
tgttgagaggttggcccctgaatatgtact

SEQ ID NO: 1529 - DNA, 36 bp, Dengue Virus; identical to SEQ ID NO: 1244

SEQ ID NO: 1530 - DNA, 66 bp, Dengue Virus
ttgttgagaggttggcccctgaatatgtacgttggaactgctctcattttggagggtaatcacaac

SEQ ID NO: 1531 - DNA, 30 bp, Dengue Virus
ttgttgagaggttggcccctgaatatgtac

SEQ ID NO: 1532 - DNA, 36 bp, Dengue Virus; identical to SEQ ID NO: 1244

SEQ ID NO: 1533 - DNA, 66 bp, Dengue Virus
attgttgagaggttggcccctgaatatgtagttggaactgctctcattttggagggtaatcacaac

SEQ ID NO: 1534 - DNA, 30 bp, Dengue Virus
attgttgagaggttggcccctgaatatgta

SEQ ID NO: 1535 - DNA, 36 bp, Dengue Virus; identical to SEQ ID NO: 1244

SEQ ID NO: 1536 - DNA, 66 bp, Dengue Virus
cattgttgagaggttggcccctgaatatgtgttggaactgctctcattttggagggtaatcacaac

SEQ ID NO: 1537 - DNA, 30 bp, Dengue Virus
cattgttgagaggttggcccctgaatatgt

SEQ ID NO: 1538 - DNA, 36 bp, Dengue Virus; identical to SEQ ID NO: 1244

SEQ ID NO: 1539 - DNA, 66 bp, Dengue Virus
tcattgttgagaggttggcccctgaatatggttggaactgctctcattttggagggtaatcacaac

SEQ ID NO: 1540 - DNA, 30 bp, Dengue Virus
tcattgttgagaggttggcccctgaatatg

SEQ ID NO: 1541 - DNA, 36 bp, Dengue Virus; identical to SEQ ID NO: 1244

SEQ ID NO: 1542 - DNA, 66 bp, Dengue Virus
gtcattgttgagaggttggcccctgaatatgttggaactgctctcattttggagggtaatcacaac

SEQ ID NO: 1543 - DNA, 30 bp, Dengue Virus
gtcattgttgagaggttggcccctgaatat

SEQ ID NO: 1544 - DNA, 36 bp, Dengue Virus; identical to SEQ ID NO: 1244

SEQ ID NO: 1545 - DNA, 66 bp, Dengue Virus
cgtcattgttgagaggttggcccctgaatagttggaactgctctcattttggagggtaatcacaac

SEQ ID NO: 1546 - DNA, 30 bp, Dengue Virus
cgtcattgttgagaggttggcccctgaata

SEQ ID NO: 1547 - DNA, 36 bp, Dengue Virus; identical to SEQ ID NO: 1244

SEQ ID NO: 1548 - DNA, 66 bp, Dengue Virus
tcgtcattgttgagaggttggcccctgaatgttggaactgctctcattttggagggtaatcacaac

SEQ ID NO: 1549 - DNA, 30 bp, Dengue Virus
tcgtcattgttgagaggttggcccctgaat

SEQ ID NO: 1550 - DNA, 36 bp, Dengue Virus; identical to SEQ ID NO: 1244

SEQ ID NO: 1551 - DNA, 66 bp, Dengue Virus
ttcgtcattgttgagaggttggcccctgaagttggaactgctctcattttggagggtaatcacaac

SEQ ID NO: 1552 - DNA, 30 bp, Dengue Virus
ttcgtcattgttgagaggttggcccctgaa

SEQ ID NO: 1553 - DNA, 36 bp, Dengue Virus; identical to SEQ ID NO: 1244

SEQ ID NO: 1554 - DNA, 66 bp, Dengue Virus
cttcgtcattgttgagaggttggcccctgagttggaactgctctcattttggagggtaatcacaac

SEQ ID NO: 1555 - DNA, 30 bp, Dengue Virus
cttcgtcattgttgagaggttggcccctga

SEQ ID NO: 1556 - DNA, 36 bp, Dengue Virus; identical to SEQ ID NO: 1244

SEQ ID NO: 1557 - DNA, 66 bp, Dengue Virus
tcttcgtcattgttgagaggttggcccctggttggaactgctctcattttggagggtaatcacaac

SEQ ID NO: 1558 - DNA, 30 bp, Dengue Virus
tcttcgtcattgttgagaggttggcccctg

SEQ ID NO: 1559 - DNA, 36 bp, Dengue Virus; identical to SEQ ID NO: 1244

SEQ ID NO: 1560 - DNA, 66 bp, Dengue Virus
gtcttcgtcattgttgagaggttggcccctgttggaactgctctcattttggagggtaatcacaac

SEQ ID NO: 1561 - DNA, 30 bp, Dengue Virus
gtcttcgtcattgttgagaggttggcccct

SEQ ID NO: 1562 - DNA, 36 bp, Dengue Virus; identical to SEQ ID NO: 1244

SEQ ID NO: 1563 - DNA, 66 bp, Dengue Virus
ggtcttcgtcattgttgagaggttggccccgttggaactgctctcattttggagggtaatcacaac

SEQ ID NO: 1564 - DNA, 30 bp, Dengue Virus
ggtcttcgtcattgttgagaggttggcccc

SEQ ID NO: 1565 - DNA, 36 bp, Dengue Virus; identical to SEQ ID NO: 1244

SEQ ID NO: 1566 - DNA, 66 bp, Dengue Virus
tggtcttcgtcattgttgagaggttggcccgttggaactgctctcattttggagggtaatcacaac

SEQ ID NO: 1567 - DNA, 30 bp, Dengue Virus
tggtcttcgtcattgttgagaggttggccc

SEQ ID NO: 1568 - DNA, 36 bp, Dengue Virus; identical to SEQ ID NO: 1244

SEQ ID NO: 1569 - DNA, 66 bp, Dengue Virus
atggtcttcgtcattgttgagaggttggccgttggaactgctctcattttggagggtaatcacaac

SEQ ID NO: 1570 - DNA, 30 bp, Dengue Virus
atggtcttcgtcattgttgagaggttggcc

SEQ ID NO: 1571 - DNA, 36 bp, Dengue Virus; identical to SEQ ID NO: 1244

SEQ ID NO: 1572 - DNA, 66 bp, Dengue Virus
catggtcttcgtcattgttgagaggttggcgttggaactgctctcattttggagggtaatcacaac

SEQ ID NO: 1573 - DNA, 30 bp, Dengue Virus
catggtcttcgtcattgttgagaggttggc

SEQ ID NO: 1574 - DNA, 36 bp, Dengue Virus; identical to SEQ ID NO: 1244

SEQ ID NO: 1575 - DNA, 66 bp, Dengue Virus
gcatggtcttcgtcattgttgagaggttgggttggaactgctctcattttggagggtaatcacaac

SEQ ID NO: 1576 - DNA, 30 bp, Dengue Virus
gcatggtcttcgtcattgttgagaggttgg

SEQ ID NO: 1577 - DNA, 36 bp, Dengue Virus; identical to SEQ ID NO: 1244

SEQ ID NO: 1578 - DNA, 66 bp, Dengue Virus
agcatggtcttcgtcattgttgagaggttggttggaactgctctcattttggagggtaatcacaac

SEQ ID NO: 1579 - DNA, 30 bp, Dengue Virus
agcatggtcttcgtcattgttgagaggttg

SEQ ID NO: 1580 - DNA, 36 bp, Dengue Virus; identical to SEQ ID NO: 1244

SEQ ID NO: 1581 - DNA, 66 bp, Dengue Virus
gagcatggtcttcgtcattgttgagaggttgttggaactgctctcattttggagggtaatcacaac

SEQ ID NO: 1582 - DNA, 30 bp, Dengue Virus
gagcatggtcttcgtcattgttgagaggtt

SEQ ID NO: 1583 - DNA, 36 bp, Dengue Virus; identical to SEQ ID NO: 1244

SEQ ID NO: 1584 - DNA, 66 bp, Dengue Virus
tgagcatggtcttcgtcattgttgagaggtgttggaactgctctcattttggagggtaatcacaac

SEQ ID NO: 1585 - DNA, 30 bp, Dengue Virus
tgagcatggtcttcgtcattgttgagaggt

SEQ ID NO: 1586 - DNA, 36 bp, Dengue Virus; identical to SEQ ID NO: 1244

SEQ ID NO: 1587 - DNA, 66 bp, Dengue Virus
agtgagcatggtcttcgtcattgttgagaggttggaactgctctcattttggagggtaatcacaac

SEQ ID NO: 1588 - DNA, 30 bp, Dengue Virus
agtgagcatggtcttcgtcattgttgagag

SEQ ID NO: 1589 - DNA, 36 bp, Dengue Virus; identical to SEQ ID NO: 1244

SEQ ID NO: 1590 - DNA, 66 bp, Dengue Virus
ccagtgagcatggtcttcgtcattgttgaggttggaactgctctcattttggagggtaatcacaac

SEQ ID NO: 1591 - DNA, 30 bp, Dengue Virus
ccagtgagcatggtcttcgtcattgttgag

SEQ ID NO: 1592 - DNA, 36 bp, Dengue Virus; identical to SEQ ID NO: 1244

SEQ ID NO: 1593 - DNA, 66 bp, Dengue Virus
gtccagtgagcatggtcttcgtcattgttggttggaactgctctcattttggagggtaatcacaac

SEQ ID NO: 1594 - DNA, 30 bp, Dengue Virus
gtccagtgagcatggtcttcgtcattgttg

SEQ ID NO: 1595 - DNA, 36 bp, Dengue Virus; identical to SEQ ID NO: 1244

SEQ ID NO: 1596 - DNA, 66 bp, Dengue Virus
ctgtccagtgagcatggtcttcgtcattgtgttggaactgctctcattttggagggtaatcacaac

SEQ ID NO: 1597 - DNA, 30 bp, Dengue Virus
ctgtccagtgagcatggtcttcgtcattgt

SEQ ID NO: 1598 - DNA, 36 bp, Dengue Virus; identical to SEQ ID NO: 1244

SEQ ID NO: 1599 - DNA, 66 bp, Dengue Virus
ttctgtccagtgagcatggtcttcgtcattgttggaactgctctcattttggagggtaatcacaac

SEQ ID NO: 1600 - DNA, 30 bp, Dengue Virus
ttctgtccagtgagcatggtcttcgtcatt

SEQ ID NO: 1601 - DNA, 36 bp, Dengue Virus; identical to SEQ ID NO: 1244

SEQ ID NO: 1602 - DNA, 66 bp, Dengue Virus
gcttctgtccagtgagcatggtcttcgtcagttggaactgctctcattttggagggtaatcacaac

SEQ ID NO: 1603 - DNA, 30 bp, Dengue Virus
gcttctgtccagtgagcatggtcttcgtca

SEQ ID NO: 1604 - DNA, 36 bp, Dengue Virus; identical to SEQ ID NO: 1244

SEQ ID NO: 1605 - DNA, 66 bp, Dengue Virus
ttgcttctgtccagtgagcatggtcttcgtgttggaactgctctcattttggagggtaatcacaac

SEQ ID NO: 1606 - DNA, 30 bp, Dengue Virus
ttgcttctgtccagtgagcatggtcttcgt

SEQ ID NO: 1607 - DNA, 36 bp, Dengue Virus; identical to SEQ ID NO: 1244

SEQ ID NO: 1608 - DNA, 66 bp, Dengue Virus
ttttgcttctgtccagtgagcatggtcttcgttggaactgctctcattttggagggtaatcacaac

SEQ ID NO: 1609 - DNA, 30 bp, Dengue Virus
ttttgcttctgtccagtgagcatggtcttc

SEQ ID NO: 1610 - DNA, 36 bp, Dengue Virus; identical to SEQ ID NO: 1244

SEQ ID NO: 1611 - DNA, 66 bp, Dengue Virus
atttttgcttctgtccagtgagcatggtctgttggaactgctctcattttggagggtaatcacaac

SEQ ID NO: 1612 - DNA, 30 bp, Dengue Virus
atttttgcttctgtccagtgagcatggtct

SEQ ID NO: 1613 - DNA, 36 bp, Dengue Virus; identical to SEQ ID NO: 1244

SEQ ID NO: 1614 - DNA, 66 bp, Dengue Virus
gcatttttgcttctgtccagtgagcatggtgttggaactgctctcattttggagggtaatcacaac

SEQ ID NO: 1615 - DNA, 30 bp, Dengue Virus
gcatttttgcttctgtccagtgagcatggt

SEQ ID NO: 1616 - DNA, 36 bp, Dengue Virus; identical to SEQ ID NO: 1244

SEQ ID NO: 1617 - DNA, 66 bp, Dengue Virus
cagcatttttgcttctgtccagtgagcatggttggaactgctctcattttggagggtaatcacaac

SEQ ID NO: 1618 - DNA, 30 bp, Dengue Virus
cagcatttttgcttctgtccagtgagcatg

SEQ ID NO: 1619 - DNA, 36 bp, Dengue Virus; identical to SEQ ID NO: 1244

SEQ ID NO: 1620 - DNA, 66 bp, Dengue Virus
agcagcatttttgcttctgtccagtgagcagttggaactgctctcattttggagggtaatcacaac

SEQ ID NO: 1621 - DNA, 30 bp, Dengue Virus
agcagcatttttgcttctgtccagtgagca

SEQ ID NO: 1622 - DNA, 36 bp, Dengue Virus; identical to SEQ ID NO: 1244

SEQ ID NO: 1623 - DNA, 66 bp, Dengue Virus
ccagcagcatttttgcttctgtccagtgaggttggaactgctctcattttggagggtaatcacaac

SEQ ID NO: 1624 - DNA, 30 bp, Dengue Virus
ccagcagcatttttgcttctgtccagtgag

SEQ ID NO: 1625 - DNA, 36 bp, Dengue Virus; identical to SEQ ID NO: 1244

SEQ ID NO: 1626 - DNA, 66 bp, Dengue Virus
gtccagcagcatttttgcttctgtccagtggttggaactgctctcattttggagggtaatcacaac

SEQ ID NO: 1627 - DNA, 30 bp, Dengue Virus
gtccagcagcatttttgcttctgtccagtg

SEQ ID NO: 1628 - DNA, 36 bp, Dengue Virus; identical to SEQ ID NO: 1244

SEQ ID NO: 1629 - DNA, 66 bp, Dengue Virus
ttgtccagcagcatttttgcttctgtccaggttggaactgctctcattttggagggtaatcacaac

SEQ ID NO: 1630 - DNA, 30 bp, Dengue Virus
ttgtccagcagcatttttgcttctgtccag

SEQ ID NO: 1631 - DNA, 36 bp, Dengue Virus; identical to SEQ ID NO: 1244

SEQ ID NO: 1632 - DNA, 66 bp, Dengue Virus
tgttgtccagcagcatttttgcttctgtccgttggaactgctctcattttggagggtaatcacaac

SEQ ID NO: 1633 - DNA, 30 bp, Dengue Virus
tgttgtccagcagcatttttgcttctgtcc

SEQ ID NO: 1634 - DNA, 36 bp, Dengue Virus; identical to SEQ ID NO: 1244

SEQ ID NO: 1635 - DNA, 66 bp, Dengue Virus
gatgttgtccagcagcatttttgcttctgtgttggaactgctctcattttggagggtaatcacaac

SEQ ID NO: 1636 - DNA, 30 bp, Dengue Virus
gatgttgtccagcagcatttttgcttctgt

SEQ ID NO: 1637 - DNA, 36 bp, Dengue Virus; identical to SEQ ID NO: 1244

SEQ ID NO: 1638 - DNA, 66 bp, Dengue Virus
ttgatgttgtccagcagcatttttgcttctgttggaactgctctcattttggagggtaatcacaac

SEQ ID NO: 1639 - DNA, 30 bp, Dengue Virus
ttgatgttgtccagcagcatttttgcttct

SEQ ID NO: 1640 - DNA, 36 bp, Dengue Virus; identical to SEQ ID NO: 1244

SEQ ID NO: 1641 - DNA, 66 bp, Dengue Virus
tgttgatgttgtccagcagcatttttgcttgttggaactgctctcattttggagggtaatcacaac

SEQ ID NO: 1642 - DNA, 30 bp, Dengue Virus
tgttgatgttgtccagcagcatttttgctt

SEQ ID NO: 1643 - DNA, 36 bp, Dengue Virus; identical to SEQ ID NO: 1244

SEQ ID NO: 1644 - DNA, 66 bp, Dengue Virus
tgtgttgatgttgtccagcagcatttttgcgttggaactgctctcattttggagggtaatcacaac

SEQ ID NO: 1645 - DNA, 30 bp, Dengue Virus
tgtgttgatgttgtccagcagcatttttgc

SEQ ID NO: 1646 - DNA, 36 bp, Dengue Virus; identical to SEQ ID NO: 1244

SEQ ID NO: 1647 - DNA, 66 bp, Dengue Virus
ggtgtgttgatgttgtccagcagcatttttgttggaactgctctcattttggagggtaatcacaac

SEQ ID NO: 1648 - DNA, 30 bp, Dengue Virus
ggtgtgttgatgttgtccagcagcattttt

SEQ ID NO: 1649 - DNA, 36 bp, Dengue Virus; identical to SEQ ID NO: 1244

SEQ ID NO: 1650 - DNA, 66 bp, Dengue Virus
ctggtgtgttgatgttgtccagcagcatttgttggaactgctctcattttggagggtaatcacaac

SEQ ID NO: 1651 - DNA, 30 bp, Dengue Virus
ctggtgtgttgatgttgtccagcagcattt

SEQ ID NO: 1652 - DNA, 36 bp, Dengue Virus; identical to SEQ ID NO: 1244

SEQ ID NO: 1653 - DNA, 66 bp, Dengue Virus
ttctggtgtgttgatgttgtccagcagcatgttggaactgctctcattttggagggtaatcacaac

SEQ ID NO: 1654 - DNA, 30 bp, Dengue Virus
ttctggtgtgttgatgttgtccagcagcat

SEQ ID NO: 1655 - DNA, 36 bp, Dengue Virus; identical to SEQ ID NO: 1244

SEQ ID NO: 1656 - DNA, 66 bp, Dengue Virus
ccttctggtgtgttgatgttgtccagcagcgttggaactgctctcattttggagggtaatcacaac

SEQ ID NO: 1657 - DNA, 30 bp, Dengue Virus
ccttctggtgtgttgatgttgtccagcagc

SEQ ID NO: 1658 - DNA, 36 bp, Dengue Virus; identical to SEQ ID NO: 1244

SEQ ID NO: 1659 - DNA, 66 bp, Dengue Virus
tcccttctggtgtgttgatgttgtccagcagttggaactgctctcattttggagggtaatcacaac

SEQ ID NO: 1660 - DNA, 30 bp, Dengue Virus
tcccttctggtgtgttgatgttgtccagca

SEQ ID NO: 1661 - DNA, 36 bp, Dengue Virus; identical to SEQ ID NO: 1244

SEQ ID NO: 1662 - DNA, 66 bp, Dengue Virus
aatcccttctggtgtgttgatgttgtccaggttggaactgctctcattttggagggtaatcacaac

SEQ ID NO: 1663 - DNA, 30 bp, Dengue Virus
aatcccttctggtgtgttgatgttgtccag

SEQ ID NO: 1664 - DNA, 36 bp, Dengue Virus; identical to SEQ ID NO: 1244

SEQ ID NO: 1665 - DNA, 66 bp, Dengue Virus
ataatcccttctggtgtgttgatgttgtccgttggaactgctctcattttggagggtaatcacaac

SEQ ID NO: 1666 - DNA, 30 bp, Dengue Virus
ataatcccttctggtgtgttgatgttgtcc

SEQ ID NO: 1667 - DNA, 36 bp, Dengue Virus; identical to SEQ ID NO: 1244

SEQ ID NO: 1668 - DNA, 66 bp, Dengue Virus
gtataatcccttctggtgtgttgatgttgtgttggaactgctctcattttggagggtaatcacaac

SEQ ID NO: 1669 - DNA, 30 bp, Dengue Virus
gtataatcccttctggtgtgttgatgttgt

SEQ ID NO: 1670 - DNA, 36 bp, Dengue Virus; identical to SEQ ID NO: 1244

SEQ ID NO: 1671 - DNA, 66 bp, Dengue Virus
tggtataatcccttctggtgtgttgatgttgttggaactgctctcattttggagggtaatcacaac

SEQ ID NO: 1672 - DNA, 30 bp, Dengue Virus
tggtataatcccttctggtgtgttgatgtt

SEQ ID NO: 1673 - DNA, 36 bp, Dengue Virus; identical to SEQ ID NO: 1244

SEQ ID NO: 1674 - DNA, 66 bp, Dengue Virus
gctggtataatcccttctggtgtgttgatggttggaactgctctcattttggagggtaatcacaac

SEQ ID NO: 1675 - DNA, 30 bp, Dengue Virus
gctggtataatcccttctggtgtgttgatg

SEQ ID NO: 1676 - DNA, 36 bp, Dengue Virus; identical to SEQ ID NO: 1244

SEQ ID NO: 1677 - DNA, 66 bp, Dengue Virus
gagctggtataatcccttctggtgtgttgagttggaactgctctcattttggagggtaatcacaac

SEQ ID NO: 1678 - DNA, 30 bp, Dengue Virus
gagctggtataatcccttctggtgtgttga

SEQ ID NO: 1679 - DNA, 36 bp, Dengue Virus; identical to SEQ ID NO: 1244

SEQ ID NO: 1680 - DNA, 66 bp, Dengue Virus
gagagctggtataatcccttctggtgtgttgttggaactgctctcattttggagggtaatcacaac

SEQ ID NO: 1681 - DNA, 30 bp, Dengue Virus
gagagctggtataatcccttctggtgtgtt

SEQ ID NO: 1682 - DNA, 36 bp, Dengue Virus; identical to SEQ ID NO: 1244

SEQ ID NO: 1683 - DNA, 66 bp, Dengue Virus
aagagagctggtataatcccttctggtgtggttggaactgctctcattttggagggtaatcacaac

SEQ ID NO: 1684 - DNA, 30 bp, Dengue Virus
aagagagctggtataatcccttctggtgtg

SEQ ID NO: 1685 - DNA, 36 bp, Dengue Virus; identical to SEQ ID NO: 1244

SEQ ID NO: 1686 - DNA, 66 bp, Dengue Virus
caaagagagctggtataatcccttctggtggttggaactgctctcattttggagggtaatcacaac

SEQ ID NO: 1687 - DNA, 30 bp, Dengue Virus
caaagagagctggtataatcccttctggtg

SEQ ID NO: 1688 - DNA, 36 bp, Dengue Virus; identical to SEQ ID NO: 1244

SEQ ID NO: 1689 - DNA, 66 bp, Dengue Virus
ttcaaagagagctggtataatcccttctgggttggaactgctctcattttggagggtaatcacaac

SEQ ID NO: 1690 - DNA, 30 bp, Dengue Virus
ttcaaagagagctggtataatcccttctgg

SEQ ID NO: 1691 - DNA, 36 bp, Dengue Virus; identical to SEQ ID NO: 1244

SEQ ID NO: 1692 - DNA, 66 bp, Dengue Virus
ggttcaaagagagctggtataatcccttctgttggaactgctctcattttggagggtaatcacaac

SEQ ID NO: 1693 - DNA, 30 bp, Dengue Virus
ggttcaaagagagctggtataatcccttct

SEQ ID NO: 1694 - DNA, 36 bp, Dengue Virus; identical to SEQ ID NO: 1244

SEQ ID NO: 1695 - DNA, 66 bp, Dengue Virus
ctggttcaaagagagctggtataatcccttgttggaactgctctcattttggagggtaatcacaac

SEQ ID NO: 1696 - DNA, 30 bp, Dengue Virus
ctggttcaaagagagctggtataatccctt

SEQ ID NO: 1697 - DNA, 36 bp, Dengue Virus; identical to SEQ ID NO: 1244

SEQ ID NO: 1698 - DNA, 66 bp, Dengue Virus
ttctggttcaaagagagctggtataatcccgttggaactgctctcattttggagggtaatcacaac

SEQ ID NO: 1699 - DNA, 30 bp, Dengue Virus
ttctggttcaaagagagctggtataatccc

SEQ ID NO: 1700 - DNA, 36 bp, Dengue Virus; identical to SEQ ID NO: 1244

SEQ ID NO: 1701 - DNA, 66 bp, Dengue Virus
ctttctggttcaaagagagctggtataatcgttggaactgctctcattttggagggtaatcacaac

SEQ ID NO: 1702 - DNA, 30 bp, Dengue Virus
ctttctggttcaaagagagctggtataatc

SEQ ID NO: 1703 - DNA, 36 bp, Dengue Virus; identical to SEQ ID NO: 1244

SEQ ID NO: 1704 - DNA, 66 bp, Dengue Virus
ccctttctggttcaaagagagctggtataagttggaactgctctcattttggagggtaatcacaac

SEQ ID NO: 1705 - DNA, 30 bp, Dengue Virus
ccctttctggttcaaagagagctggtataa

SEQ ID NO: 1706 - DNA, 36 bp, Dengue Virus; identical to SEQ ID NO: 1244

SEQ ID NO: 1707 - DNA, 66 bp, Dengue Virus
ctccctttctggttcaaagagagctggtatgttggaactgctctcattttggagggtaatcacaac

SEQ ID NO: 1708 - DNA, 30 bp, Dengue Virus
ctccctttctggttcaaagagagctggtat

SEQ ID NO: 1709 - DNA, 36 bp, Dengue Virus; identical to SEQ ID NO: 1244

SEQ ID NO: 1710 - DNA, 66 bp, Dengue Virus
ttctccctttctggttcaaagagagctggtgttggaactgctctcattttggagggtaatcacaac

SEQ ID NO: 1711 - DNA, 30 bp, Dengue Virus
ttctccctttctggttcaaagagagctggt

SEQ ID NO: 1712 - DNA, 36 bp, Dengue Virus; identical to SEQ ID NO: 1244

SEQ ID NO: 1713 - DNA, 66 bp, Dengue Virus
acttctccctttctggttcaaagagagctggttggaactgctctcattttggagggtaatcacaac

SEQ ID NO: 1714 - DNA, 30 bp, Dengue Virus
acttctccctttctggttcaaagagagctg

SEQ ID NO: 1715 - DNA, 36 bp, Dengue Virus; identical to SEQ ID NO: 1244

SEQ ID NO: 1716 - DNA, 66 bp, Dengue Virus
tgacttctccctttctggttcaaagagagcgttggaactgctctcattttggagggtaatcacaac

SEQ ID NO: 1717 - DNA, 30 bp, Dengue Virus
tgacttctccctttctggttcaaagagagc

SEQ ID NO: 1718 - DNA, 36 bp, Dengue Virus; identical to SEQ ID NO: 1244

SEQ ID NO: 1719 - DNA, 66 bp, Dengue Virus
gctgacttctccctttctggttcaaagagagttggaactgctctcattttggagggtaatcacaac

SEQ ID NO: 1720 - DNA, 30 bp, Dengue Virus
gctgacttctccctttctggttcaaagaga

SEQ ID NO: 1721 - DNA, 36 bp, Dengue Virus; identical to SEQ ID NO: 1244

SEQ ID NO: 1722 - DNA, 66 bp, Dengue Virus
ggctgacttctccctttctggttcaaagaggttggaactgctctcattttggagggtaatcacaac

SEQ ID NO: 1723 - DNA, 30 bp, Dengue Virus
ggctgacttctccctttctggttcaaagag

SEQ ID NO: 1724 - DNA, 36 bp, Dengue Virus; identical to SEQ ID NO: 1244

SEQ ID NO: 1725 - DNA, 66 bp, Dengue Virus
cggctgacttctccctttctggttcaaagagttggaactgctctcattttggagggtaatcacaac

SEQ ID NO: 1726 - DNA, 30 bp, Dengue Virus
cggctgacttctccctttctggttcaaaga

SEQ ID NO: 1727 - DNA, 36 bp, Dengue Virus; identical to SEQ ID NO: 1244

SEQ ID NO: 1728 - DNA, 66 bp, Dengue Virus
gcggctgacttctccctttctggttcaaaggttggaactgctctcattttggagggtaatcacaac

SEQ ID NO: 1729 - DNA, 30 bp, Dengue Virus
gcggctgacttctccctttctggttcaaag

SEQ ID NO: 1730 - DNA, 36 bp, Dengue Virus; identical to SEQ ID NO: 1244

SEQ ID NO: 1731 - DNA, 66 bp, Dengue Virus
ggcggctgacttctccctttctggttcaaagttggaactgctctcattttggagggtaatcacaac

SEQ ID NO: 1732 - DNA, 30 bp, Dengue Virus
ggcggctgacttctccctttctggttcaaa

SEQ ID NO: 1733 - DNA, 36 bp, Dengue Virus; identical to SEQ ID NO: 1244

SEQ ID NO: 1734 - DNA, 66 bp, Dengue Virus
tggcggctgacttctccctttctggttcaagttggaactgctctcattttggagggtaatcacaac

SEQ ID NO: 1735 - DNA, 30 bp, Dengue Virus
tggcggctgacttctccctttctggttcaa

SEQ ID NO: 1736 - DNA, 36 bp, Dengue Virus; identical to SEQ ID NO: 1244

SEQ ID NO: 1737 - DNA, 66 bp, Dengue Virus
atggcggctgacttctccctttctggttcagttggaactgctctcattttggagggtaatcacaac

SEQ ID NO: 1738 - DNA, 30 bp, Dengue Virus
atggcggctgacttctccctttctggttca

SEQ ID NO: 1739 - DNA, 36 bp, Dengue Virus; identical to SEQ ID NO: 1244

SEQ ID NO: 1740 - DNA, 66 bp, Dengue Virus
tatggcggctgacttctccctttctggttcgttggaactgctctcattttggagggtaatcacaac

SEQ ID NO: 1741 - DNA, 30 bp, Dengue Virus
tatggcggctgacttctccctttctggttc

SEQ ID NO: 1742 - DNA, 36 bp, Dengue Virus; identical to SEQ ID NO: 1244

SEQ ID NO: 1743 - DNA, 66 bp, Dengue Virus
ctatggcggctgacttctccctttctggttgttggaactgctctcattttggagggtaatcacaac

SEQ ID NO: 1744 - DNA, 30 bp, Dengue Virus
ctatggcggctgacttctccctttctggtt

SEQ ID NO: 1745 - DNA, 36 bp, Dengue Virus; identical to SEQ ID NO: 1244

SEQ ID NO: 1746 - DNA, 66 bp, Dengue Virus
tctatggcggctgacttctccctttctggtgttggaactgctctcattttggagggtaatcacaac

SEQ ID NO: 1747 - DNA, 30 bp, Dengue Virus
tctatggcggctgacttctccctttctggt

SEQ ID NO: 1748 - DNA, 36 bp, Dengue Virus; identical to SEQ ID NO: 1244

SEQ ID NO: 1749 - DNA, 66 bp, Dengue Virus
gtctatggcggctgacttctccctttctgggttggaactgctctcattttggagggtaatcacaac

SEQ ID NO: 1750 - DNA, 30 bp, Dengue Virus
gtctatggcggctgacttctccctttctgg

SEQ ID NO: 1751 - DNA, 36 bp, Dengue Virus; identical to SEQ ID NO: 1244

SEQ ID NO: 1752 - DNA, 66 bp, Dengue Virus
cgtctatggcggctgacttctccctttctggttggaactgctctcattttggagggtaatcacaac

SEQ ID NO: 1753 - DNA, 30 bp, Dengue Virus
cgtctatggcggctgacttctccctttctg

SEQ ID NO: 1754 - DNA, 36 bp, Dengue Virus; identical to SEQ ID NO: 1244

SEQ ID NO: 1755 - DNA, 66 bp, Dengue Virus
ccgtctatggcggctgacttctccctttctgttggaactgctctcattttggagggtaatcacaac

SEQ ID NO: 1756 - DNA, 30 bp, Dengue Virus
ccgtctatggcggctgacttctccctttct

SEQ ID NO: 1757 - DNA, 36 bp, Dengue Virus; identical to SEQ ID NO: 1244

SEQ ID NO: 1758 - DNA, 66 bp, Dengue Virus
accgtctatggcggctgacttctccctttcgttggaactgctctcattttggagggtaatcacaac

SEQ ID NO: 1759 - DNA, 30 bp, Dengue Virus
accgtctatggcggctgacttctccctttc

SEQ ID NO: 1760 - DNA, 36 bp, Dengue Virus; identical to SEQ ID NO: 1244

SEQ ID NO: 1761 - DNA, 66 bp, Dengue Virus
caccgtctatggcggctgacttctccctttgttggaactgctctcattttggagggtaatcacaac

SEQ ID NO: 1762 - DNA, 30 bp, Dengue Virus
caccgtctatggcggctgacttctcccttt

SEQ ID NO: 1763 - DNA, 36 bp, Dengue Virus; identical to SEQ ID NO: 1244

SEQ ID NO: 1764 - DNA, 66 bp, Dengue Virus
tcaccgtctatggcggctgacttctcccttgttggaactgctctcattttggagggtaatcacaac

SEQ ID NO: 1765 - DNA, 30 bp, Dengue Virus
tcaccgtctatggcggctgacttctccctt

SEQ ID NO: 1766 - DNA, 36 bp, Dengue Virus; identical to SEQ ID NO: 1244

SEQ ID NO: 1767 - DNA, 66 bp, Dengue Virus
ttcaccgtctatggcggctgacttctccctgttggaactgctctcattttggagggtaatcacaac

SEQ ID NO: 1768 - DNA, 30 bp, Dengue Virus
ttcaccgtctatggcggctgacttctccct

SEQ ID NO: 1769 - DNA, 36 bp, Dengue Virus; identical to SEQ ID NO: 1244

SEQ ID NO: 1770 - DNA, 66 bp, Dengue Virus
attcaccgtctatggcggctgacttctcccgttggaactgctctcattttggagggtaatcacaac

SEQ ID NO: 1771 - DNA, 30 bp, Dengue Virus
attcaccgtctatggcggctgacttctccc

SEQ ID NO: 1772 - DNA, 36 bp, Dengue Virus; identical to SEQ ID NO: 1244

SEQ ID NO: 1773 - DNA, 66 bp, Dengue Virus
tattcaccgtctatggcggctgacttctccgttggaactgctctcattttggagggtaatcacaac

SEQ ID NO: 1774 - DNA, 30 bp, Dengue Virus
tattcaccgtctatggcggctgacttctcc

SEQ ID NO: 1775 - DNA, 36 bp, Dengue Virus; identical to SEQ ID NO: 1244

SEQ ID NO: 1776 - DNA, 66 bp, Dengue Virus
gtattcaccgtctatggcggctgacttctcgttggaactgctctcattttggagggtaatcacaac

SEQ ID NO: 1777 - DNA, 30 bp, Dengue Virus
gtattcaccgtctatggcggctgacttctc

SEQ ID NO: 1778 - DNA, 36 bp, Dengue Virus; identical to SEQ ID NO: 1244

SEQ ID NO: 1779 - DNA, 66 bp, Dengue Virus
ggtattcaccgtctatggcggctgacttctgttggaactgctctcattttggagggtaatcacaac

SEQ ID NO: 1780 - DNA, 30 bp, Dengue Virus
ggtattcaccgtctatggcggctgacttct

SEQ ID NO: 1781 - DNA, 36 bp, Dengue Virus; identical to SEQ ID NO: 1244

SEQ ID NO: 1782 - DNA, 66 bp, Dengue Virus
cggtattcaccgtctatggcggctgacttcgttggaactgctctcattttggagggtaatcacaac

SEQ ID NO: 1783 - DNA, 30 bp, Dengue Virus
cggtattcaccgtctatggcggctgacttc

SEQ ID NO: 1784 - DNA, 36 bp, Dengue Virus; identical to SEQ ID NO: 1244

SEQ ID NO: 1785 - DNA, 66 bp, Dengue Virus
gcggtattcaccgtctatggcggctgacttgttggaactgctctcattttggagggtaatcacaac

SEQ ID NO: 1786 - DNA, 30 bp, Dengue Virus
gcggtattcaccgtctatggcggctgactt

SEQ ID NO: 1787 - DNA, 36 bp, Dengue Virus; identical to SEQ ID NO: 1244

SEQ ID NO: 1788 - DNA, 66 bp, Dengue Virus
ggcggtattcaccgtctatggcggctgactgttggaactgctctcattttggagggtaatcacaac

SEQ ID NO: 1789 - DNA, 30 bp, Dengue Virus
ggcggtattcaccgtctatggcggctgact

SEQ ID NO: 1790 - DNA, 36 bp, Dengue Virus; identical to SEQ ID NO: 1244

SEQ ID NO: 1791 - DNA, 66 bp, Dengue Virus
aggcggtattcaccgtctatggcggctgacgttggaactgctctcattttggagggtaatcacaac

SEQ ID NO: 1792 - DNA, 30 bp, Dengue Virus
aggcggtattcaccgtctatggcggctgac

SEQ ID NO: 1793 - DNA, 36 bp, Dengue Virus; identical to SEQ ID NO: 1244

SEQ ID NO: 1794 - DNA, 66 bp, Dengue Virus
caggcggtattcaccgtctatggcggctgagttggaactgctctcattttggagggtaatcacaac

SEQ ID NO: 1795 - DNA, 30 bp, Dengue Virus
caggcggtattcaccgtctatggcggctga

SEQ ID NO: 1796 - DNA, 36 bp, Dengue Virus; identical to SEQ ID NO: 1244

SEQ ID NO: 1797 - DNA, 66 bp, Dengue Virus
tcaggcggtattcaccgtctatggcggctggttggaactgctctcattttggagggtaatcacaac

SEQ ID NO: 1798 - DNA, 30 bp, Dengue Virus
tcaggcggtattcaccgtctatggcggctg

SEQ ID NO: 1799 - DNA, 36 bp, Dengue Virus; identical to SEQ ID NO: 1244

SEQ ID NO: 1800 - DNA, 66 bp, Dengue Virus
ttcaggcggtattcaccgtctatggcggctgttggaactgctctcattttggagggtaatcacaac

SEQ ID NO: 1801 - DNA, 30 bp, Dengue Virus
ttcaggcggtattcaccgtctatggcggct

SEQ ID NO: 1802 - DNA, 36 bp, Dengue Virus; identical to SEQ ID NO: 1244

SEQ ID NO: 1803 - DNA, 66 bp, Dengue Virus
cttcaggcggtattcaccgtctatggcggcgttggaactgctctcattttggagggtaatcacaac

SEQ ID NO: 1804 - DNA, 30 bp, Dengue Virus
cttcaggcggtattcaccgtctatggcggc

SEQ ID NO: 1805 - DNA, 36 bp, Dengue Virus; identical to SEQ ID NO: 1244

SEQ ID NO: 1806 - DNA, 66 bp, Dengue Virus
ccttcaggcggtattcaccgtctatggcgggttggaactgctctcattttggagggtaatcacaac

SEQ ID NO: 1807 - DNA, 30 bp, Dengue Virus
ccttcaggcggtattcaccgtctatggcgg

SEQ ID NO: 1808 - DNA, 36 bp, Dengue Virus; identical to SEQ ID NO: 1244

SEQ ID NO: 1809 - DNA, 66 bp, Dengue Virus
cccttcaggcggtattcaccgtctatggcggttggaactgctctcattttggagggtaatcacaac

SEQ ID NO: 1810 - DNA, 30 bp, Dengue Virus
cccttcaggcggtattcaccgtctatggcg

SEQ ID NO: 1811 - DNA, 36 bp, Dengue Virus; identical to SEQ ID NO: 1244

SEQ ID NO: 1812 - DNA, 66 bp, Artificial Sequence
  synthetic
attaatttaacagtatcaccatcaatcgctgttggaactgctctcattttggagggtaatcacaac

SEQ ID NO: 1813 - DNA, 30 bp, Artificial Sequence
  synthetic
attaatttaacagtatcaccatcaatcgct

SEQ ID NO: 1814 - DNA, 36 bp, Artificial Sequence; identical to SEQ ID NO: 1244
  synthetic

SEQ ID NO: 1815 - DNA, 66 bp, Artificial Sequence
  synthetic
cattaatttaacagtatcaccatcaatcgcgttggaactgctctcattttggagggtaatcacaac

SEQ ID NO: 1816 - DNA, 30 bp, Artificial Sequence
  synthetic
cattaatttaacagtatcaccatcaatcgc

SEQ ID NO: 1817 - DNA, 36 bp, Artificial Sequence; identical to SEQ ID NO: 1244
  synthetic

SEQ ID NO: 1818 - DNA, 66 bp, Artificial Sequence
  synthetic
acattaatttaacagtatcaccatcaatcggttggaactgctctcattttggagggtaatcacaac

SEQ ID NO: 1819 - DNA, 30 bp, Artificial Sequence
  synthetic
acattaatttaacagtatcaccatcaatcg

SEQ ID NO: 1820 - DNA, 36 bp, Artificial Sequence; identical to SEQ ID NO: 1244
  synthetic

SEQ ID NO: 1821 - DNA, 66 bp, Artificial Sequence
  synthetic
tacattaatttaacagtatcaccatcaatcgttggaactgctctcattttggagggtaatcacaac

SEQ ID NO: 1822 - DNA, 30 bp, Artificial Sequence
  synthetic
tacattaatttaacagtatcaccatcaatc

SEQ ID NO: 1823 - DNA, 36 bp, Artificial Sequence; identical to SEQ ID NO: 1244
  synthetic

SEQ ID NO: 1824 - DNA, 66 bp, Artificial Sequence
  synthetic
gtacattaatttaacagtatcaccatcaatgttggaactgctctcattttggagggtaatcacaac

SEQ ID NO: 1825 - DNA, 30 bp, Artificial Sequence
  synthetic
gtacattaatttaacagtatcaccatcaat

SEQ ID NO: 1826 - DNA, 36 bp, Artificial Sequence; identical to SEQ ID NO: 1244
  synthetic

SEQ ID NO: 1827 - DNA, 66 bp, Artificial Sequence
  synthetic
tgtacattaatttaacagtatcaccatcaagttggaactgctctcattttggagggtaatcacaac

SEQ ID NO: 1828 - DNA, 30 bp, Artificial Sequence
  synthetic
tgtacattaatttaacagtatcaccatcaa

SEQ ID NO: 1829 - DNA, 36 bp, Artificial Sequence; identical to SEQ ID NO: 1244
  synthetic

SEQ ID NO: 1830 - DNA, 66 bp, Artificial Sequence
  synthetic
ttgtacattaatttaacagtatcaccatcagttggaactgctctcattttggagggtaatcacaac

SEQ ID NO: 1831 - DNA, 30 bp, Artificial Sequence
  synthetic
ttgtacattaatttaacagtatcaccatca

SEQ ID NO: 1832 - DNA, 36 bp, Artificial Sequence; identical to SEQ ID NO: 1244
  synthetic

SEQ ID NO: 1833 - DNA, 66 bp, Artificial Sequence
  synthetic
tttgtacattaatttaacagtatcaccatcgttggaactgctctcattttggagggtaatcacaac

SEQ ID NO: 1834 - DNA, 30 bp, Artificial Sequence
  synthetic
tttgtacattaatttaacagtatcaccatc

SEQ ID NO: 1835 - DNA, 36 bp, Artificial Sequence; identical to SEQ ID NO: 1244
  synthetic

SEQ ID NO: 1836 - DNA, 66 bp, Artificial Sequence
  synthetic
ctttgtacattaatttaacagtatcaccatgttggaactgctctcattttggagggtaatcacaac

SEQ ID NO: 1837 - DNA, 30 bp, Artificial Sequence
  synthetic
ctttgtacattaatttaacagtatcaccat

SEQ ID NO: 1838 - DNA, 36 bp, Artificial Sequence; identical to SEQ ID NO: 1244
  synthetic

SEQ ID NO: 1839 - DNA, 66 bp, Artificial Sequence
  synthetic
cctttgtacattaatttaacagtatcaccagttggaactgctctcattttggagggtaatcacaac

SEQ ID NO: 1840 - DNA, 30 bp, Artificial Sequence
  synthetic
cctttgtacattaatttaacagtatcacca

SEQ ID NO: 1841 - DNA, 36 bp, Artificial Sequence; identical to SEQ ID NO: 1244
  synthetic

SEQ ID NO: 1842 - DNA, 66 bp, Artificial Sequence
  synthetic
acctttgtacattaatttaacagtatcaccgttggaactgctctcattttggagggtaatcacaac

SEQ ID NO: 1843 - DNA, 30 bp, Artificial Sequence
  synthetic
acctttgtacattaatttaacagtatcacc

SEQ ID NO: 1844 - DNA, 36 bp, Artificial Sequence; identical to SEQ ID NO: 1244
  synthetic

SEQ ID NO: 1845 - DNA, 66 bp, Artificial Sequence
  synthetic
gacctttgtacattaatttaacagtatcacgttggaactgctctcattttggagggtaatcacaac

SEQ ID NO: 1846 - DNA, 30 bp, Artificial Sequence
  synthetic
gacctttgtacattaatttaacagtatcac

SEQ ID NO: 1847 - DNA, 36 bp, Artificial Sequence; identical to SEQ ID NO: 1244
  synthetic

SEQ ID NO: 1848 - DNA, 66 bp, Artificial Sequence
  synthetic
tgacctttgtacattaatttaacagtatcagttggaactgctctcattttggagggtaatcacaac

SEQ ID NO: 1849 - DNA, 30 bp, Artificial Sequence
  synthetic
tgacctttgtacattaatttaacagtatca

SEQ ID NO: 1850 - DNA, 36 bp, Artificial Sequence; identical to SEQ ID NO: 1244
  synthetic

SEQ ID NO: 1851 - DNA, 66 bp, Artificial Sequence
  synthetic
ttgacctttgtacattaatttaacagtatcgttggaactgctctcattttggagggtaatcacaac

SEQ ID NO: 1852 - DNA, 30 bp, Artificial Sequence
  synthetic
ttgacctttgtacattaatttaacagtatc

SEQ ID NO: 1853 - DNA, 36 bp, Artificial Sequence; identical to SEQ ID NO: 1244
  synthetic

SEQ ID NO: 1854 - DNA, 66 bp, Artificial Sequence
  synthetic
gttgacctttgtacattaatttaacagtatgttggaactgctctcattttggagggtaatcacaac

SEQ ID NO: 1855 - DNA, 30 bp, Artificial Sequence
  synthetic
gttgacctttgtacattaatttaacagtat

SEQ ID NO: 1856 - DNA, 36 bp, Artificial Sequence; identical to SEQ ID NO: 1244
  synthetic

SEQ ID NO: 1857 - DNA, 66 bp, Artificial Sequence
  synthetic
ggttgacctttgtacattaatttaacagtagttggaactgctctcattttggagggtaatcacaac

SEQ ID NO: 1858 - DNA, 30 bp, Artificial Sequence
  synthetic
ggttgacctttgtacattaatttaacagta

SEQ ID NO: 1859 - DNA, 36 bp, Artificial Sequence; identical to SEQ ID NO: 1244
  synthetic

SEQ ID NO: 1860 - DNA, 66 bp, Artificial Sequence
  synthetic
tggttgacctttgtacattaatttaacagtgttggaactgctctcattttggagggtaatcacaac

SEQ ID NO: 1861 - DNA, 30 bp, Artificial Sequence
  synthetic
tggttgacctttgtacattaatttaacagt

SEQ ID NO: 1862 - DNA, 36 bp, Artificial Sequence; identical to SEQ ID NO: 1244
  synthetic

SEQ ID NO: 1863 - DNA, 66 bp, Artificial Sequence
  synthetic
ttggttgacctttgtacattaatttaacaggttggaactgctctcattttggagggtaatcacaac

SEQ ID NO: 1864 - DNA, 30 bp, Artificial Sequence
  synthetic
ttggttgacctttgtacattaatttaacag

SEQ ID NO: 1865 - DNA, 36 bp, Artificial Sequence; identical to SEQ ID NO: 1244
  synthetic

SEQ ID NO: 1866 - DNA, 66 bp, Artificial Sequence
  synthetic
attggttgacctttgtacattaatttaacagttggaactgctctcattttggagggtaatcacaac

SEQ ID NO: 1867 - DNA, 30 bp, Artificial Sequence
  synthetic
attggttgacctttgtacattaatttaaca

SEQ ID NO: 1868 - DNA, 36 bp, Artificial Sequence; identical to SEQ ID NO: 1244
  synthetic

SEQ ID NO: 1869 - DNA, 66 bp, Artificial Sequence
  synthetic
cattggttgacctttgtacattaatttaacgttggaactgctctcattttggagggtaatcacaac

SEQ ID NO: 1870 - DNA, 30 bp, Artificial Sequence
  synthetic
cattggttgacctttgtacattaatttaac

SEQ ID NO: 1871 - DNA, 36 bp, Artificial Sequence; identical to SEQ ID NO: 1244
  synthetic

SEQ ID NO: 1872 - DNA, 66 bp, Artificial Sequence
  synthetic
gtcattggttgacctttgtacattaatttagttggaactgctctcattttggagggtaatcacaac

SEQ ID NO: 1873 - DNA, 30 bp, Artificial Sequence
  synthetic
gtcattggttgacctttgtacattaattta

SEQ ID NO: 1874 - DNA, 36 bp, Artificial Sequence; identical to SEQ ID NO: 1244
  synthetic

SEQ ID NO: 1875 - DNA, 66 bp, Artificial Sequence
  synthetic
atgtcattggttgacctttgtacattaattgttggaactgctctcattttggagggtaatcacaac

SEQ ID NO: 1876 - DNA, 30 bp, Artificial Sequence
  synthetic
atgtcattggttgacctttgtacattaatt

SEQ ID NO: 1877 - DNA, 36 bp, Artificial Sequence; identical to SEQ ID NO: 1244
  synthetic

SEQ ID NO: 1878 - DNA, 66 bp, Artificial Sequence
  synthetic
gaatgtcattggttgacctttgtacattaagttggaactgctctcattttggagggtaatcacaac

SEQ ID NO: 1879 - DNA, 30 bp, Artificial Sequence
  synthetic
gaatgtcattggttgacctttgtacattaa

SEQ ID NO: 1880 - DNA, 36 bp, Artificial Sequence; identical to SEQ ID NO: 1244
  synthetic

SEQ ID NO: 1881 - DNA, 66 bp, Artificial Sequence
  synthetic
ctgaatgtcattggttgacctttgtacattgttggaactgctctcattttggagggtaatcacaac

SEQ ID NO: 1882 - DNA, 30 bp, Artificial Sequence
  synthetic
ctgaatgtcattggttgacctttgtacatt

SEQ ID NO: 1883 - DNA, 36 bp, Artificial Sequence; identical to SEQ ID NO: 1244
  synthetic

SEQ ID NO: 1884 - DNA, 66 bp, Artificial Sequence
  synthetic
gtctgaatgtcattggttgacctttgtacagttggaactgctctcattttggagggtaatcacaac

SEQ ID NO: 1885 - DNA, 30 bp, Artificial Sequence
  synthetic
gtctgaatgtcattggttgacctttgtaca

SEQ ID NO: 1886 - DNA, 36 bp, Artificial Sequence; identical to SEQ ID NO: 1244
  synthetic

SEQ ID NO: 1887 - DNA, 66 bp, Artificial Sequence
  synthetic
tagtctgaatgtcattggttgacctttgtagttggaactgctctcattttggagggtaatcacaac

SEQ ID NO: 1888 - DNA, 30 bp, Artificial Sequence
  synthetic
tagtctgaatgtcattggttgacctttgta

SEQ ID NO: 1889 - DNA, 36 bp, Artificial Sequence; identical to SEQ ID NO: 1244
  synthetic

SEQ ID NO: 1890 - DNA, 66 bp, Artificial Sequence
  synthetic
aatagtctgaatgtcattggttgacctttggttggaactgctctcattttggagggtaatcacaac

SEQ ID NO: 1891 - DNA, 30 bp, Artificial Sequence
  synthetic
aatagtctgaatgtcattggttgacctttg

SEQ ID NO: 1892 - DNA, 36 bp, Artificial Sequence; identical to SEQ ID NO: 1244
  synthetic

SEQ ID NO: 1893 - DNA, 66 bp, Artificial Sequence
  synthetic
ataatagtctgaatgtcattggttgaccttgttggaactgctctcattttggagggtaatcacaac

SEQ ID NO: 1894 - DNA, 30 bp, Artificial Sequence
  synthetic
ataatagtctgaatgtcattggttgacctt

SEQ ID NO: 1895 - DNA, 36 bp, Artificial Sequence; identical to SEQ ID NO: 1244
  synthetic

SEQ ID NO: 1896 - DNA, 66 bp, Artificial Sequence
  synthetic
caataatagtctgaatgtcattggttgaccgttggaactgctctcattttggagggtaatcacaac

SEQ ID NO: 1897 - DNA, 30 bp, Artificial Sequence
  synthetic
caataatagtctgaatgtcattggttgacc

SEQ ID NO: 1898 - DNA, 36 bp, Artificial Sequence; identical to SEQ ID NO: 1244
  synthetic

SEQ ID NO: 1899 - DNA, 66 bp, Artificial Sequence
  synthetic
accaataatagtctgaatgtcattggttgagttggaactgctctcattttggagggtaatcacaac

SEQ ID NO: 1900 - DNA, 30 bp, Artificial Sequence
  synthetic
accaataatagtctgaatgtcattggttga

SEQ ID NO: 1901 - DNA, 36 bp, Artificial Sequence; identical to SEQ ID NO: 1244
  synthetic

SEQ ID NO: 1902 - DNA, 66 bp, Artificial Sequence
  synthetic
caaccaataatagtctgaatgtcattggttgttggaactgctctcattttggagggtaatcacaac

SEQ ID NO: 1903 - DNA, 30 bp, Artificial Sequence
  synthetic
caaccaataatagtctgaatgtcattggtt

SEQ ID NO: 1904 - DNA, 36 bp, Artificial Sequence; identical to SEQ ID NO: 1244
  synthetic

SEQ ID NO: 1905 - DNA, 66 bp, Artificial Sequence
  synthetic
atcaaccaataatagtctgaatgtcattgggttggaactgctctcattttggagggtaatcacaac

SEQ ID NO: 1906 - DNA, 30 bp, Artificial Sequence
  synthetic
atcaaccaataatagtctgaatgtcattgg

SEQ ID NO: 1907 - DNA, 36 bp, Artificial Sequence; identical to SEQ ID NO: 1244
  synthetic

SEQ ID NO: 1908 - DNA, 66 bp, Artificial Sequence
  synthetic
gtatcaaccaataatagtctgaatgtcattgttggaactgctctcattttggagggtaatcacaac

SEQ ID NO: 1909 - DNA, 30 bp, Artificial Sequence
  synthetic
gtatcaaccaataatagtctgaatgtcatt

SEQ ID NO: 1910 - DNA, 36 bp, Artificial Sequence; identical to SEQ ID NO: 1244
  synthetic

SEQ ID NO: 1911 - DNA, 66 bp, Artificial Sequence
  synthetic
gtgtatcaaccaataatagtctgaatgtcagttggaactgctctcattttggagggtaatcacaac

SEQ ID NO: 1912 - DNA, 30 bp, Artificial Sequence
  synthetic
gtgtatcaaccaataatagtctgaatgtca

SEQ ID NO: 1913 - DNA, 36 bp, Artificial Sequence; identical to SEQ ID NO: 1244
  synthetic

SEQ ID NO: 1914 - DNA, 66 bp, Artificial Sequence
  synthetic
aggtgtatcaaccaataatagtctgaatgtgttggaactgctctcattttggagggtaatcacaac

SEQ ID NO: 1915 - DNA, 30 bp, Artificial Sequence
  synthetic
aggtgtatcaaccaataatagtctgaatgt

SEQ ID NO: 1916 - DNA, 36 bp, Artificial Sequence; identical to SEQ ID NO: 1244
  synthetic

SEQ ID NO: 1917 - DNA, 66 bp, Artificial Sequence
  synthetic
tcaggtgtatcaaccaataatagtctgaatgttggaactgctctcattttggagggtaatcacaac

SEQ ID NO: 1918 - DNA, 30 bp, Artificial Sequence
  synthetic
tcaggtgtatcaaccaataatagtctgaat

SEQ ID NO: 1919 - DNA, 36 bp, Artificial Sequence; identical to SEQ ID NO: 1244
  synthetic

SEQ ID NO: 1920 - DNA, 66 bp, Artificial Sequence
  synthetic
tttcaggtgtatcaaccaataatagtctgagttggaactgctctcattttggagggtaatcacaac

SEQ ID NO: 1921 - DNA, 30 bp, Artificial Sequence
  synthetic
tttcaggtgtatcaaccaataatagtctga

SEQ ID NO: 1922 - DNA, 36 bp, Artificial Sequence; identical to SEQ ID NO: 1244
  synthetic

SEQ ID NO: 1923 - DNA, 66 bp, Artificial Sequence
  synthetic
tgtttcaggtgtatcaaccaataatagtctgttggaactgctctcattttggagggtaatcacaac

SEQ ID NO: 1924 - DNA, 30 bp, Artificial Sequence
  synthetic
tgtttcaggtgtatcaaccaataatagtct

SEQ ID NO: 1925 - DNA, 36 bp, Artificial Sequence; identical to SEQ ID NO: 1244
  synthetic

SEQ ID NO: 1926 - DNA, 66 bp, Artificial Sequence
  synthetic
tttgtttcaggtgtatcaaccaataatagtgttggaactgctctcattttggagggtaatcacaac

SEQ ID NO: 1927 - DNA, 30 bp, Artificial Sequence
  synthetic
tttgtttcaggtgtatcaaccaataatagt

SEQ ID NO: 1928 - DNA, 36 bp, Artificial Sequence; identical to SEQ ID NO: 1244
  synthetic

SEQ ID NO: 1929 - DNA, 66 bp, Artificial Sequence
  synthetic
gctttgtttcaggtgtatcaaccaataatagttggaactgctctcattttggagggtaatcacaac

SEQ ID NO: 1930 - DNA, 30 bp, Artificial Sequence
  synthetic
gctttgtttcaggtgtatcaaccaataata

SEQ ID NO: 1931 - DNA, 36 bp, Artificial Sequence; identical to SEQ ID NO: 1244
  synthetic

SEQ ID NO: 1932 - DNA, 66 bp, Artificial Sequence
  synthetic
atgctttgtttcaggtgtatcaaccaataagttggaactgctctcattttggagggtaatcacaac

SEQ ID NO: 1933 - DNA, 30 bp, Artificial Sequence
  synthetic
atgctttgtttcaggtgtatcaaccaataa

SEQ ID NO: 1934 - DNA, 36 bp, Artificial Sequence; identical to SEQ ID NO: 1244
  synthetic

SEQ ID NO: 1935 - DNA, 66 bp, Artificial Sequence
  synthetic
ggatgctttgtttcaggtgtatcaaccaatgttggaactgctctcattttggagggtaatcacaac

SEQ ID NO: 1936 - DNA, 30 bp, Artificial Sequence
  synthetic
ggatgctttgtttcaggtgtatcaaccaat

SEQ ID NO: 1937 - DNA, 36 bp, Artificial Sequence; identical to SEQ ID NO: 1244
  synthetic

SEQ ID NO: 1938 - DNA, 66 bp, Artificial Sequence
  synthetic
taggatgctttgtttcaggtgtatcaaccagttggaactgctctcattttggagggtaatcacaac

SEQ ID NO: 1939 - DNA, 30 bp, Artificial Sequence
  synthetic
taggatgctttgtttcaggtgtatcaacca

SEQ ID NO: 1940 - DNA, 36 bp, Artificial Sequence; identical to SEQ ID NO: 1244
  synthetic

SEQ ID NO: 1941 - DNA, 66 bp, Artificial Sequence
  synthetic
tttaggatgctttgtttcaggtgtatcaacgttggaactgctctcattttggagggtaatcacaac

SEQ ID NO: 1942 - DNA, 30 bp, Artificial Sequence
  synthetic
tttaggatgctttgtttcaggtgtatcaac

SEQ ID NO: 1943 - DNA, 36 bp, Artificial Sequence; identical to SEQ ID NO: 1244
  synthetic

SEQ ID NO: 1944 - DNA, 66 bp, Artificial Sequence
  synthetic
tttttaggatgctttgtttcaggtgtatcagttggaactgctctcattttggagggtaatcacaac

SEQ ID NO: 1945 - DNA, 30 bp, Artificial Sequence
  synthetic
tttttaggatgctttgtttcaggtgtatca

SEQ ID NO: 1946 - DNA, 36 bp, Artificial Sequence; identical to SEQ ID NO: 1244
  synthetic

SEQ ID NO: 1947 - DNA, 66 bp, Artificial Sequence
  synthetic
cttttttaggatgctttgtttcaggtgtatgttggaactgctctcattttggagggtaatcacaac

SEQ ID NO: 1948 - DNA, 30 bp, Artificial Sequence
  synthetic
cttttttaggatgctttgtttcaggtgtat

SEQ ID NO: 1949 - DNA, 36 bp, Artificial Sequence; identical to SEQ ID NO: 1244
  synthetic

SEQ ID NO: 1950 - DNA, 66 bp, Artificial Sequence
  synthetic
accttttttaggatgctttgtttcaggtgtgttggaactgctctcattttggagggtaatcacaac

SEQ ID NO: 1951 - DNA, 30 bp, Artificial Sequence
  synthetic
accttttttaggatgctttgtttcaggtgt

SEQ ID NO: 1952 - DNA, 36 bp, Artificial Sequence; identical to SEQ ID NO: 1244
  synthetic

SEQ ID NO: 1953 - DNA, 66 bp, Artificial Sequence
  synthetic
acaccttttttaggatgctttgtttcaggtgttggaactgctctcattttggagggtaatcacaac

SEQ ID NO: 1954 - DNA, 30 bp, Artificial Sequence
  synthetic
acaccttttttaggatgctttgtttcaggt

SEQ ID NO: 1955 - DNA, 36 bp, Artificial Sequence; identical to SEQ ID NO: 1244
  synthetic

SEQ ID NO: 1956 - DNA, 66 bp, Artificial Sequence
  synthetic
ctacaccttttttaggatgctttgtttcaggttggaactgctctcattttggagggtaatcacaac

SEQ ID NO: 1957 - DNA, 30 bp, Artificial Sequence
  synthetic
ctacaccttttttaggatgctttgtttcag

SEQ ID NO: 1958 - DNA, 36 bp, Artificial Sequence; identical to SEQ ID NO: 1244
  synthetic

SEQ ID NO: 1959 - DNA, 66 bp, Artificial Sequence
  synthetic
ctctacaccttttttaggatgctttgtttcgttggaactgctctcattttggagggtaatcacaac

SEQ ID NO: 1960 - DNA, 30 bp, Artificial Sequence
  synthetic
ctctacaccttttttaggatgctttgtttc

SEQ ID NO: 1961 - DNA, 36 bp, Artificial Sequence; identical to SEQ ID NO: 1244
  synthetic

SEQ ID NO: 1962 - DNA, 66 bp, Artificial Sequence
  synthetic
ttctctacaccttttttaggatgctttgttgttggaactgctctcattttggagggtaatcacaac

SEQ ID NO: 1963 - DNA, 30 bp, Artificial Sequence
  synthetic
ttctctacaccttttttaggatgctttgtt

SEQ ID NO: 1964 - DNA, 36 bp, Artificial Sequence; identical to SEQ ID NO: 1244
  synthetic

SEQ ID NO: 1965 - DNA, 66 bp, Artificial Sequence
  synthetic
atttctctacaccttttttaggatgctttggttggaactgctctcattttggagggtaatcacaac

SEQ ID NO: 1966 - DNA, 30 bp, Artificial Sequence
  synthetic
atttctctacaccttttttaggatgctttg

SEQ ID NO: 1967 - DNA, 36 bp, Artificial Sequence; identical to SEQ ID NO: 1244
  synthetic

SEQ ID NO: 1968 - DNA, 66 bp, Artificial Sequence
  synthetic
atatttctctacaccttttttaggatgcttgttggaactgctctcattttggagggtaatcacaac

SEQ ID NO: 1969 - DNA, 30 bp, Artificial Sequence
  synthetic
atatttctctacaccttttttaggatgctt

SEQ ID NO: 1970 - DNA, 36 bp, Artificial Sequence; identical to SEQ ID NO: 1244
  synthetic

SEQ ID NO: 1971 - DNA, 66 bp, Artificial Sequence
  synthetic
ccatatttctctacaccttttttaggatgcgttggaactgctctcattttggagggtaatcacaac

SEQ ID NO: 1972 - DNA, 30 bp, Artificial Sequence
  synthetic
ccatatttctctacaccttttttaggatgc

SEQ ID NO: 1973 - DNA, 36 bp, Artificial Sequence; identical to SEQ ID NO: 1244
  synthetic

SEQ ID NO: 1974 - DNA, 66 bp, Artificial Sequence
  synthetic
gaccatatttctctacaccttttttaggatgttggaactgctctcattttggagggtaatcacaac

SEQ ID NO: 1975 - DNA, 30 bp, Artificial Sequence
  synthetic
gaccatatttctctacaccttttttaggat

SEQ ID NO: 1976 - DNA, 36 bp, Artificial Sequence; identical to SEQ ID NO: 1244
  synthetic

SEQ ID NO: 1977 - DNA, 66 bp, Artificial Sequence
  synthetic
aggaccatatttctctacaccttttttagggttggaactgctctcattttggagggtaatcacaac

SEQ ID NO: 1978 - DNA, 30 bp, Artificial Sequence
  synthetic
aggaccatatttctctacaccttttttagg

SEQ ID NO: 1979 - DNA, 36 bp, Artificial Sequence; identical to SEQ ID NO: 1244
  synthetic

SEQ ID NO: 1980 - DNA, 66 bp, Artificial Sequence
  synthetic
tcaggaccatatttctctacaccttttttagttggaactgctctcattttggagggtaatcacaac

SEQ ID NO: 1981 - DNA, 30 bp, Artificial Sequence
  synthetic
tcaggaccatatttctctacacctttttta

SEQ ID NO: 1982 - DNA, 36 bp, Artificial Sequence; identical to SEQ ID NO: 1244
  synthetic

SEQ ID NO: 1983 - DNA, 66 bp, Artificial Sequence
  synthetic
cttcaggaccatatttctctacacctttttgttggaactgctctcattttggagggtaatcacaac

SEQ ID NO: 1984 - DNA, 30 bp, Artificial Sequence
  synthetic
cttcaggaccatatttctctacaccttttt

SEQ ID NO: 1985 - DNA, 36 bp, Artificial Sequence; identical to SEQ ID NO: 1244
  synthetic

SEQ ID NO: 1986 - DNA, 66 bp, Artificial Sequence
  synthetic
tgcttcaggaccatatttctctacacctttgttggaactgctctcattttggagggtaatcacaac

SEQ ID NO: 1987 - DNA, 30 bp, Artificial Sequence
  synthetic
tgcttcaggaccatatttctctacaccttt

SEQ ID NO: 1988 - DNA, 36 bp, Artificial Sequence; identical to SEQ ID NO: 1244
  synthetic

SEQ ID NO: 1989 - DNA, 66 bp, Artificial Sequence
  synthetic
cttgcttcaggaccatatttctctacacctgttggaactgctctcattttggagggtaatcacaac

SEQ ID NO: 1990 - DNA, 30 bp, Artificial Sequence
  synthetic
cttgcttcaggaccatatttctctacacct

SEQ ID NO: 1991 - DNA, 36 bp, Artificial Sequence; identical to SEQ ID NO: 1244
  synthetic

SEQ ID NO: 1992 - DNA, 66 bp, Artificial Sequence
  synthetic
cacttgcttcaggaccatatttctctacacgttggaactgctctcattttggagggtaatcacaac

SEQ ID NO: 1993 - DNA, 30 bp, Artificial Sequence
  synthetic
cacttgcttcaggaccatatttctctacac

SEQ ID NO: 1994 - DNA, 36 bp, Artificial Sequence; identical to SEQ ID NO: 1244
  synthetic

SEQ ID NO: 1995 - DNA, 66 bp, Artificial Sequence
  synthetic
tgcacttgcttcaggaccatatttctctacgttggaactgctctcattttggagggtaatcacaac

SEQ ID NO: 1996 - DNA, 30 bp, Artificial Sequence
  synthetic
tgcacttgcttcaggaccatatttctctac

SEQ ID NO: 1997 - DNA, 36 bp, Artificial Sequence; identical to SEQ ID NO: 1244
  synthetic

SEQ ID NO: 1998 - DNA, 66 bp, Artificial Sequence
  synthetic
aatgcacttgcttcaggaccatatttctctgttggaactgctctcattttggagggtaatcacaac

SEQ ID NO: 1999 - DNA, 30 bp, Artificial Sequence
  synthetic
aatgcacttgcttcaggaccatatttctct

SEQ ID NO: 2000 - DNA, 36 bp, Artificial Sequence; identical to SEQ ID NO: 1244
  synthetic

SEQ ID NO: 2001 - DNA, 66 bp, Artificial Sequence
  synthetic
taaatgcacttgcttcaggaccatatttctgttggaactgctctcattttggagggtaatcacaac

SEQ ID NO: 2002 - DNA, 30 bp, Artificial Sequence
  synthetic
taaatgcacttgcttcaggaccatatttct

SEQ ID NO: 2003 - DNA, 36 bp, Artificial Sequence; identical to SEQ ID NO: 1244
  synthetic

SEQ ID NO: 2004 - DNA, 66 bp, Artificial Sequence
  synthetic
cgtaaatgcacttgcttcaggaccatatttgttggaactgctctcattttggagggtaatcacaac

SEQ ID NO: 2005 - DNA, 30 bp, Artificial Sequence
  synthetic
cgtaaatgcacttgcttcaggaccatattt

SEQ ID NO: 2006 - DNA, 36 bp, Artificial Sequence; identical to SEQ ID NO: 1244
  synthetic

SEQ ID NO: 2007 - DNA, 66 bp, Artificial Sequence
  synthetic
tcgtaaatgcacttgcttcaggaccatattgttggaactgctctcattttggagggtaatcacaac

SEQ ID NO: 2008 - DNA, 30 bp, Artificial Sequence
  synthetic
tcgtaaatgcacttgcttcaggaccatatt

SEQ ID NO: 2009 - DNA, 36 bp, Artificial Sequence; identical to SEQ ID NO: 1244
  synthetic

SEQ ID NO: 2010 - DNA, 66 bp, Artificial Sequence
  synthetic
ttcgtaaatgcacttgcttcaggaccatatgttggaactgctctcattttggagggtaatcacaac

SEQ ID NO: 2011 - DNA, 30 bp, Artificial Sequence
  synthetic
ttcgtaaatgcacttgcttcaggaccatat

SEQ ID NO: 2012 - DNA, 36 bp, Artificial Sequence; identical to SEQ ID NO: 1244
  synthetic

SEQ ID NO: 2013 - DNA, 66 bp, Artificial Sequence
  synthetic
tttcgtaaatgcacttgcttcaggaccatagttggaactgctctcattttggagggtaatcacaac

SEQ ID NO: 2014 - DNA, 30 bp, Artificial Sequence
  synthetic
tttcgtaaatgcacttgcttcaggaccata

SEQ ID NO: 2015 - DNA, 36 bp, Artificial Sequence; identical to SEQ ID NO: 1244
  synthetic

SEQ ID NO: 2016 - DNA, 66 bp, Artificial Sequence
  synthetic
ttttcgtaaatgcacttgcttcaggaccatgttggaactgctctcattttggagggtaatcacaac

SEQ ID NO: 2017 - DNA, 30 bp, Artificial Sequence
  synthetic
ttttcgtaaatgcacttgcttcaggaccat

SEQ ID NO: 2018 - DNA, 36 bp, Artificial Sequence; identical to SEQ ID NO: 1244
  synthetic

SEQ ID NO: 2019 - DNA, 66 bp, Artificial Sequence
  synthetic
tttttcgtaaatgcacttgcttcaggaccagttggaactgctctcattttggagggtaatcacaac

SEQ ID NO: 2020 - DNA, 30 bp, Artificial Sequence
  synthetic
tttttcgtaaatgcacttgcttcaggacca

SEQ ID NO: 2021 - DNA, 36 bp, Artificial Sequence; identical to SEQ ID NO: 1244
  synthetic

SEQ ID NO: 2022 - DNA, 66 bp, Artificial Sequence
  synthetic
ctttttcgtaaatgcacttgcttcaggaccgttggaactgctctcattttggagggtaatcacaac

SEQ ID NO: 2023 - DNA, 30 bp, Artificial Sequence
  synthetic
ctttttcgtaaatgcacttgcttcaggacc

SEQ ID NO: 2024 - DNA, 36 bp, Artificial Sequence; identical to SEQ ID NO: 1244
  synthetic

SEQ ID NO: 2025 - DNA, 66 bp, Artificial Sequence
  synthetic
tctttttcgtaaatgcacttgcttcaggacgttggaactgctctcattttggagggtaatcacaac

SEQ ID NO: 2026 - DNA, 30 bp, Artificial Sequence
  synthetic
tctttttcgtaaatgcacttgcttcaggac

SEQ ID NO: 2027 - DNA, 36 bp, Artificial Sequence; identical to SEQ ID NO: 1244
  synthetic

SEQ ID NO: 2028 - DNA, 66 bp, Artificial Sequence
  synthetic
atctttttcgtaaatgcacttgcttcaggagttggaactgctctcattttggagggtaatcacaac

SEQ ID NO: 2029 - DNA, 30 bp, Artificial Sequence
  synthetic
atctttttcgtaaatgcacttgcttcagga

SEQ ID NO: 2030 - DNA, 36 bp, Artificial Sequence; identical to SEQ ID NO: 1244
  synthetic

SEQ ID NO: 2031 - DNA, 66 bp, Artificial Sequence
  synthetic
catctttttcgtaaatgcacttgcttcagggttggaactgctctcattttggagggtaatcacaac

SEQ ID NO: 2032 - DNA, 30 bp, Artificial Sequence
  synthetic
catctttttcgtaaatgcacttgcttcagg

SEQ ID NO: 2033 - DNA, 36 bp, Artificial Sequence; identical to SEQ ID NO: 1244
  synthetic

SEQ ID NO: 2034 - DNA, 66 bp, Artificial Sequence
  synthetic
ccatctttttcgtaaatgcacttgcttcaggttggaactgctctcattttggagggtaatcacaac

SEQ ID NO: 2035 - DNA, 30 bp, Artificial Sequence
  synthetic
ccatctttttcgtaaatgcacttgcttcag

SEQ ID NO: 2036 - DNA, 36 bp, Artificial Sequence; identical to SEQ ID NO: 1244
  synthetic

SEQ ID NO: 2037 - DNA, 66 bp, Artificial Sequence
  synthetic
accatctttttcgtaaatgcacttgcttcagttggaactgctctcattttggagggtaatcacaac

SEQ ID NO: 2038 - DNA, 30 bp, Artificial Sequence
  synthetic
accatctttttcgtaaatgcacttgcttca

SEQ ID NO: 2039 - DNA, 36 bp, Artificial Sequence; identical to SEQ ID NO: 1244
  synthetic

SEQ ID NO: 2040 - DNA, 66 bp, Artificial Sequence
  synthetic
taccatctttttcgtaaatgcacttgcttcgttggaactgctctcattttggagggtaatcacaac

SEQ ID NO: 2041 - DNA, 30 bp, Artificial Sequence
  synthetic
taccatctttttcgtaaatgcacttgcttc

SEQ ID NO: 2042 - DNA, 36 bp, Artificial Sequence; identical to SEQ ID NO: 1244
  synthetic

SEQ ID NO: 2043 - DNA, 66 bp, Artificial Sequence
  synthetic
ctaccatctttttcgtaaatgcacttgcttgttggaactgctctcattttggagggtaatcacaac

SEQ ID NO: 2044 - DNA, 30 bp, Artificial Sequence
  synthetic
ctaccatctttttcgtaaatgcacttgctt

SEQ ID NO: 2045 - DNA, 36 bp, Artificial Sequence; identical to SEQ ID NO: 1244
  synthetic

SEQ ID NO: 2046 - DNA, 66 bp, Artificial Sequence
  synthetic
tctaccatctttttcgtaaatgcacttgctgttggaactgctctcattttggagggtaatcacaac

SEQ ID NO: 2047 - DNA, 30 bp, Artificial Sequence
  synthetic
tctaccatctttttcgtaaatgcacttgct

SEQ ID NO: 2048 - DNA, 36 bp, Artificial Sequence; identical to SEQ ID NO: 1244
  synthetic

SEQ ID NO: 2049 - DNA, 66 bp, Artificial Sequence
  synthetic
ttctaccatctttttcgtaaatgcacttgcgttggaactgctctcattttggagggtaatcacaac

SEQ ID NO: 2050 - DNA, 30 bp, Artificial Sequence
  synthetic
ttctaccatctttttcgtaaatgcacttgc

SEQ ID NO: 2051 - DNA, 36 bp, Artificial Sequence; identical to SEQ ID NO: 1244
  synthetic

SEQ ID NO: 2052 - DNA, 66 bp, Artificial Sequence
  synthetic
tttctaccatctttttcgtaaatgcacttggttggaactgctctcattttggagggtaatcacaac

SEQ ID NO: 2053 - DNA, 30 bp, Artificial Sequence
  synthetic
tttctaccatctttttcgtaaatgcacttg

SEQ ID NO: 2054 - DNA, 36 bp, Artificial Sequence; identical to SEQ ID NO: 1244
  synthetic

SEQ ID NO: 2055 - DNA, 66 bp, Artificial Sequence
  synthetic
ttttctaccatctttttcgtaaatgcacttgttggaactgctctcattttggagggtaatcacaac

SEQ ID NO: 2056 - DNA, 30 bp, Artificial Sequence
  synthetic
ttttctaccatctttttcgtaaatgcactt

SEQ ID NO: 2057 - DNA, 36 bp, Artificial Sequence; identical to SEQ ID NO: 1244
  synthetic

SEQ ID NO: 2058 - DNA, 66 bp, Artificial Sequence
  synthetic
attttctaccatctttttcgtaaatgcactgttggaactgctctcattttggagggtaatcacaac

SEQ ID NO: 2059 - DNA, 30 bp, Artificial Sequence
  synthetic
attttctaccatctttttcgtaaatgcact

SEQ ID NO: 2060 - DNA, 36 bp, Artificial Sequence; identical to SEQ ID NO: 1244
  synthetic

SEQ ID NO: 2061 - DNA, 66 bp, Artificial Sequence
  synthetic
cattttctaccatctttttcgtaaatgcacgttggaactgctctcattttggagggtaatcacaac

SEQ ID NO: 2062 - DNA, 30 bp, Artificial Sequence
  synthetic
cattttctaccatctttttcgtaaatgcac

SEQ ID NO: 2063 - DNA, 36 bp, Artificial Sequence; identical to SEQ ID NO: 1244
  synthetic

SEQ ID NO: 2064 - DNA, 66 bp, Artificial Sequence
  synthetic
gcattttctaccatctttttcgtaaatgcagttggaactgctctcattttggagggtaatcacaac

SEQ ID NO: 2065 - DNA, 30 bp, Artificial Sequence
  synthetic
gcattttctaccatctttttcgtaaatgca

SEQ ID NO: 2066 - DNA, 36 bp, Artificial Sequence; identical to SEQ ID NO: 1244
  synthetic

SEQ ID NO: 2067 - DNA, 66 bp, Artificial Sequence
  synthetic
tgcattttctaccatctttttcgtaaatgcgttggaactgctctcattttggagggtaatcacaac

SEQ ID NO: 2068 - DNA, 30 bp, Artificial Sequence
  synthetic
tgcattttctaccatctttttcgtaaatgc

SEQ ID NO: 2069 - DNA, 36 bp, Artificial Sequence; identical to SEQ ID NO: 1244
  synthetic

SEQ ID NO: 2070 - DNA, 66 bp, Artificial Sequence
  synthetic
ttgcattttctaccatctttttcgtaaatggttggaactgctctcattttggagggtaatcacaac

SEQ ID NO: 2071 - DNA, 30 bp, Artificial Sequence
  synthetic
ttgcattttctaccatctttttcgtaaatg

SEQ ID NO: 2072 - DNA, 36 bp, Artificial Sequence; identical to SEQ ID NO: 1244
  synthetic

SEQ ID NO: 2073 - DNA, 66 bp, Artificial Sequence
  synthetic
tttgcattttctaccatctttttcgtaaatgttggaactgctctcattttggagggtaatcacaac

SEQ ID NO: 2074 - DNA, 30 bp, Artificial Sequence
  synthetic
tttgcattttctaccatctttttcgtaaat

SEQ ID NO: 2075 - DNA, 36 bp, Artificial Sequence; identical to SEQ ID NO: 1244
  synthetic

SEQ ID NO: 2076 - DNA, 66 bp, Artificial Sequence
  synthetic
ctttgcattttctaccatctttttcgtaaagttggaactgctctcattttggagggtaatcacaac

SEQ ID NO: 2077 - DNA, 30 bp, Artificial Sequence
  synthetic
ctttgcattttctaccatctttttcgtaaa

SEQ ID NO: 2078 - DNA, 36 bp, Artificial Sequence; identical to SEQ ID NO: 1244
  synthetic

SEQ ID NO: 2079 - DNA, 66 bp, Artificial Sequence
  synthetic
tctttgcattttctaccatctttttcgtaagttggaactgctctcattttggagggtaatcacaac

SEQ ID NO: 2080 - DNA, 30 bp, Artificial Sequence
  synthetic
tctttgcattttctaccatctttttcgtaa

SEQ ID NO: 2081 - DNA, 36 bp, Artificial Sequence; identical to SEQ ID NO: 1244
  synthetic

SEQ ID NO: 2082 - DNA, 66 bp, Artificial Sequence
  synthetic
ttctttgcattttctaccatctttttcgtagttggaactgctctcattttggagggtaatcacaac

SEQ ID NO: 2083 - DNA, 30 bp, Artificial Sequence
  synthetic
ttctttgcattttctaccatctttttcgta

SEQ ID NO: 2084 - DNA, 36 bp, Artificial Sequence; identical to SEQ ID NO: 1244
  synthetic

SEQ ID NO: 2085 - DNA, 66 bp, Artificial Sequence
  synthetic
tttctttgcattttctaccatctttttcgtgttggaactgctctcattttggagggtaatcacaac

SEQ ID NO: 2086 - DNA, 30 bp, Artificial Sequence
  synthetic
tttctttgcattttctaccatctttttcgt

SEQ ID NO: 2087 - DNA, 36 bp, Artificial Sequence; identical to SEQ ID NO: 1244
  synthetic

SEQ ID NO: 2088 - DNA, 66 bp, Artificial Sequence
  synthetic
ttttctttgcattttctaccatctttttcggttggaactgctctcattttggagggtaatcacaac

SEQ ID NO: 2089 - DNA, 30 bp, Artificial Sequence
  synthetic
ttttctttgcattttctaccatctttttcg

SEQ ID NO: 2090 - DNA, 36 bp, Artificial Sequence; identical to SEQ ID NO: 1244
  synthetic

SEQ ID NO: 2091 - DNA, 66 bp, Artificial Sequence
  synthetic
attttctttgcattttctaccatctttttcgttggaactgctctcattttggagggtaatcacaac

SEQ ID NO: 2092 - DNA, 30 bp, Artificial Sequence
  synthetic
attttctttgcattttctaccatctttttc

SEQ ID NO: 2093 - DNA, 36 bp, Artificial Sequence; identical to SEQ ID NO: 1244
  synthetic

SEQ ID NO: 2094 - DNA, 66 bp, Artificial Sequence
  synthetic
aattttctttgcattttctaccatctttttgttggaactgctctcattttggagggtaatcacaac

SEQ ID NO: 2095 - DNA, 30 bp, Artificial Sequence
  synthetic
aattttctttgcattttctaccatcttttt

SEQ ID NO: 2096 - DNA, 36 bp, Artificial Sequence; identical to SEQ ID NO: 1244
  synthetic

SEQ ID NO: 2097 - DNA, 66 bp, Artificial Sequence
  synthetic
caattttctttgcattttctaccatcttttgttggaactgctctcattttggagggtaatcacaac

SEQ ID NO: 2098 - DNA, 30 bp, Artificial Sequence
  synthetic
caattttctttgcattttctaccatctttt

SEQ ID NO: 2099 - DNA, 36 bp, Artificial Sequence; identical to SEQ ID NO: 1244
  synthetic

SEQ ID NO: 2100 - DNA, 66 bp, Artificial Sequence
  synthetic
atccccgggtaccgagctcgaattcactgggttggaactgctctcattttggagggtaatcacaac

SEQ ID NO: 2101 - DNA, 30 bp, Artificial Sequence
  synthetic
atccccgggtaccgagctcgaattcactgg

SEQ ID NO: 2102 - DNA, 36 bp, Artificial Sequence; identical to SEQ ID NO: 1244
  synthetic

SEQ ID NO: 2103 - DNA, 66 bp, Artificial Sequence
  synthetic
gatccccgggtaccgagctcgaattcactggttggaactgctctcattttggagggtaatcacaac

SEQ ID NO: 2104 - DNA, 30 bp, Artificial Sequence
  synthetic
gatccccgggtaccgagctcgaattcactg

SEQ ID NO: 2105 - DNA, 36 bp, Artificial Sequence; identical to SEQ ID NO: 1244
  synthetic

SEQ ID NO: 2106 - DNA, 66 bp, Artificial Sequence
  synthetic
ggatccccgggtaccgagctcgaattcactgttggaactgctctcattttggagggtaatcacaac

SEQ ID NO: 2107 - DNA, 30 bp, Artificial Sequence
  synthetic
ggatccccgggtaccgagctcgaattcact

SEQ ID NO: 2108 - DNA, 36 bp, Artificial Sequence; identical to SEQ ID NO: 1244
  synthetic

SEQ ID NO: 2109 - DNA, 66 bp, Artificial Sequence
  synthetic
agaggatccccgggtaccgagctcgaattcgttggaactgctctcattttggagggtaatcacaac

SEQ ID NO: 2110 - DNA, 30 bp, Artificial Sequence
  synthetic
agaggatccccgggtaccgagctcgaattc

SEQ ID NO: 2111 - DNA, 36 bp, Artificial Sequence; identical to SEQ ID NO: 1244
  synthetic

SEQ ID NO: 2112 - DNA, 66 bp, Artificial Sequence
  synthetic
ctagaggatccccgggtaccgagctcgaatgttggaactgctctcattttggagggtaatcacaac

SEQ ID NO: 2113 - DNA, 30 bp, Artificial Sequence
  synthetic
ctagaggatccccgggtaccgagctcgaat

SEQ ID NO: 2114 - DNA, 36 bp, Artificial Sequence; identical to SEQ ID NO: 1244
  synthetic

SEQ ID NO: 2115 - DNA, 66 bp, Artificial Sequence
  synthetic
tttctagaggatccccgggtaccgagctcggttggaactgctctcattttggagggtaatcacaac

SEQ ID NO: 2116 - DNA, 30 bp, Artificial Sequence
  synthetic
tttctagaggatccccgggtaccgagctcg

SEQ ID NO: 2117 - DNA, 36 bp, Artificial Sequence; identical to SEQ ID NO: 1244
  synthetic

SEQ ID NO: 2118 - DNA, 66 bp, Artificial Sequence
  synthetic
atttctagaggatccccgggtaccgagctcgttggaactgctctcattttggagggtaatcacaac

SEQ ID NO: 2119 - DNA, 30 bp, Artificial Sequence
  synthetic
atttctagaggatccccgggtaccgagctc

SEQ ID NO: 2120 - DNA, 36 bp, Artificial Sequence; identical to SEQ ID NO: 1244
  synthetic

SEQ ID NO: 2121 - DNA, 66 bp, Artificial Sequence
  synthetic
atatttctagaggatccccgggtaccgagcgttggaactgctctcattttggagggtaatcacaac

SEQ ID NO: 2122 - DNA, 30 bp, Artificial Sequence
  synthetic
atatttctagaggatccccgggtaccgagc

SEQ ID NO: 2123 - DNA, 36 bp, Artificial Sequence; identical to SEQ ID NO: 1244
  synthetic

SEQ ID NO: 2124 - DNA, 66 bp, Artificial Sequence
  synthetic
catatttctagaggatccccgggtaccgaggttggaactgctctcattttggagggtaatcacaac

SEQ ID NO: 2125 - DNA, 30 bp, Artificial Sequence
  synthetic
catatttctagaggatccccgggtaccgag

SEQ ID NO: 2126 - DNA, 36 bp, Artificial Sequence; identical to SEQ ID NO: 1244
  synthetic

SEQ ID NO: 2127 - DNA, 66 bp, Artificial Sequence
  synthetic
atccatatttctagaggatccccgggtaccgttggaactgctctcattttggagggtaatcacaac

SEQ ID NO: 2128 - DNA, 30 bp, Artificial Sequence
  synthetic
atccatatttctagaggatccccgggtacc

SEQ ID NO: 2129 - DNA, 36 bp, Artificial Sequence; identical to SEQ ID NO: 1244
  synthetic

SEQ ID NO: 2130 - DNA, 66 bp, Artificial Sequence
  synthetic
aatccatatttctagaggatccccgggtacgttggaactgctctcattttggagggtaatcacaac

SEQ ID NO: 2131 - DNA, 30 bp, Artificial Sequence
  synthetic
aatccatatttctagaggatccccgggtac

SEQ ID NO: 2132 - DNA, 36 bp, Artificial Sequence; identical to SEQ ID NO: 1244
  synthetic

SEQ ID NO: 2133 - DNA, 66 bp, Artificial Sequence
  synthetic
taatccatatttctagaggatccccgggtagttggaactgctctcattttggagggtaatcacaac

SEQ ID NO: 2134 - DNA, 30 bp, Artificial Sequence
  synthetic
taatccatatttctagaggatccccgggta

SEQ ID NO: 2135 - DNA, 36 bp, Artificial Sequence; identical to SEQ ID NO: 1244
  synthetic

SEQ ID NO: 2136 - DNA, 66 bp, Artificial Sequence
  synthetic
agtaatccatatttctagaggatccccggggttggaactgctctcattttggagggtaatcacaac

SEQ ID NO: 2137 - DNA, 30 bp, Artificial Sequence
  synthetic
agtaatccatatttctagaggatccccggg

SEQ ID NO: 2138 - DNA, 36 bp, Artificial Sequence; identical to SEQ ID NO: 1244
  synthetic

SEQ ID NO: 2139 - DNA, 66 bp, Artificial Sequence
  synthetic
aagtaatccatatttctagaggatccccgggttggaactgctctcattttggagggtaatcacaac

SEQ ID NO: 2140 - DNA, 30 bp, Artificial Sequence
  synthetic
aagtaatccatatttctagaggatccccgg

SEQ ID NO: 2141 - DNA, 36 bp, Artificial Sequence; identical to SEQ ID NO: 1244
  synthetic

SEQ ID NO: 2142 - DNA, 66 bp, Artificial Sequence
  synthetic
tctaccaagtaatccatatttctagaggatgttggaactgctctcattttggagggtaatcacaac

SEQ ID NO: 2143 - DNA, 30 bp, Artificial Sequence
  synthetic
tctaccaagtaatccatatttctagaggat

SEQ ID NO: 2144 - DNA, 36 bp, Artificial Sequence; identical to SEQ ID NO: 1244
  synthetic

SEQ ID NO: 2145 - DNA, 66 bp, Artificial Sequence
  synthetic
gttctaccaagtaatccatatttctagagggttggaactgctctcattttggagggtaatcacaac

SEQ ID NO: 2146 - DNA, 30 bp, Artificial Sequence
  synthetic
gttctaccaagtaatccatatttctagagg

SEQ ID NO: 2147 - DNA, 36 bp, Artificial Sequence; identical to SEQ ID NO: 1244
  synthetic

SEQ ID NO: 2148 - DNA, 66 bp, Artificial Sequence
  synthetic
ctgttctaccaagtaatccatatttctagagttggaactgctctcattttggagggtaatcacaac

SEQ ID NO: 2149 - DNA, 30 bp, Artificial Sequence
  synthetic
ctgttctaccaagtaatccatatttctaga

SEQ ID NO: 2150 - DNA, 36 bp, Artificial Sequence; identical to SEQ ID NO: 1244
  synthetic

SEQ ID NO: 2151 - DNA, 66 bp, Artificial Sequence
  synthetic
ttgctgttctaccaagtaatccatatttctgttggaactgctctcattttggagggtaatcacaac

SEQ ID NO: 2152 - DNA, 30 bp, Artificial Sequence
  synthetic
ttgctgttctaccaagtaatccatatttct

SEQ ID NO: 2153 - DNA, 36 bp, Artificial Sequence; identical to SEQ ID NO: 1244
  synthetic

SEQ ID NO: 2154 - DNA, 66 bp, Artificial Sequence
  synthetic
gattgctgttctaccaagtaatccatatttgttggaactgctctcattttggagggtaatcacaac

SEQ ID NO: 2155 - DNA, 30 bp, Artificial Sequence
  synthetic
gattgctgttctaccaagtaatccatattt

SEQ ID NO: 2156 - DNA, 36 bp, Artificial Sequence; identical to SEQ ID NO: 1244
  synthetic

SEQ ID NO: 2157 - DNA, 66 bp, Artificial Sequence
  synthetic
agattgctgttctaccaagtaatccatattgttggaactgctctcattttggagggtaatcacaac

SEQ ID NO: 2158 - DNA, 30 bp, Artificial Sequence
  synthetic
agattgctgttctaccaagtaatccatatt

SEQ ID NO: 2159 - DNA, 36 bp, Artificial Sequence; identical to SEQ ID NO: 1244
  synthetic

SEQ ID NO: 2160 - DNA, 66 bp, Artificial Sequence
  synthetic
agtagattgctgttctaccaagtaatccatgttggaactgctctcattttggagggtaatcacaac

SEQ ID NO: 2161 - DNA, 30 bp, Artificial Sequence
  synthetic
agtagattgctgttctaccaagtaatccat

SEQ ID NO: 2162 - DNA, 36 bp, Artificial Sequence; identical to SEQ ID NO: 1244
  synthetic

SEQ ID NO: 2163 - DNA, 66 bp, Artificial Sequence
  synthetic
gagtagattgctgttctaccaagtaatccagttggaactgctctcattttggagggtaatcacaac

SEQ ID NO: 2164 - DNA, 30 bp, Artificial Sequence
  synthetic
gagtagattgctgttctaccaagtaatcca

SEQ ID NO: 2165 - DNA, 36 bp, Artificial Sequence; identical to SEQ ID NO: 1244
  synthetic

SEQ ID NO: 2166 - DNA, 66 bp, Artificial Sequence
  synthetic
cgagtagattgctgttctaccaagtaatccgttggaactgctctcattttggagggtaatcacaac

SEQ ID NO: 2167 - DNA, 30 bp, Artificial Sequence
  synthetic
cgagtagattgctgttctaccaagtaatcc

SEQ ID NO: 2168 - DNA, 36 bp, Artificial Sequence; identical to SEQ ID NO: 1244
  synthetic

SEQ ID NO: 2169 - DNA, 66 bp, Artificial Sequence
  synthetic
tcgagtagattgctgttctaccaagtaatcgttggaactgctctcattttggagggtaatcacaac

SEQ ID NO: 2170 - DNA, 30 bp, Artificial Sequence
  synthetic
tcgagtagattgctgttctaccaagtaatc

SEQ ID NO: 2171 - DNA, 36 bp, Artificial Sequence; identical to SEQ ID NO: 1244
  synthetic

SEQ ID NO: 2172 - DNA, 66 bp, Artificial Sequence
  synthetic
ggtcgagtagattgctgttctaccaagtaagttggaactgctctcattttggagggtaatcacaac

SEQ ID NO: 2173 - DNA, 30 bp, Artificial Sequence
  synthetic
ggtcgagtagattgctgttctaccaagtaa

SEQ ID NO: 2174 - DNA, 36 bp, Artificial Sequence; identical to SEQ ID NO: 1244
  synthetic

SEQ ID NO: 2175 - DNA, 66 bp, Artificial Sequence
  synthetic
aggtcgagtagattgctgttctaccaagtagttggaactgctctcattttggagggtaatcacaac

SEQ ID NO: 2176 - DNA, 30 bp, Artificial Sequence
  synthetic
aggtcgagtagattgctgttctaccaagta

SEQ ID NO: 2177 - DNA, 36 bp, Artificial Sequence; identical to SEQ ID NO: 1244
  synthetic

SEQ ID NO: 2178 - DNA, 66 bp, Artificial Sequence
  synthetic
gcaggtcgagtagattgctgttctaccaaggttggaactgctctcattttggagggtaatcacaac

SEQ ID NO: 2179 - DNA, 30 bp, Artificial Sequence
  synthetic
gcaggtcgagtagattgctgttctaccaag

SEQ ID NO: 2180 - DNA, 36 bp, Artificial Sequence; identical to SEQ ID NO: 1244
  synthetic

SEQ ID NO: 2181 - DNA, 66 bp, Artificial Sequence
  synthetic
tgcaggtcgagtagattgctgttctaccaagttggaactgctctcattttggagggtaatcacaac

SEQ ID NO: 2182 - DNA, 30 bp, Artificial Sequence
  synthetic
tgcaggtcgagtagattgctgttctaccaa

SEQ ID NO: 2183 - DNA, 36 bp, Artificial Sequence; identical to SEQ ID NO: 1244
  synthetic

SEQ ID NO: 2184 - DNA, 66 bp, Artificial Sequence
  synthetic
ctgcaggtcgagtagattgctgttctaccagttggaactgctctcattttggagggtaatcacaac

SEQ ID NO: 2185 - DNA, 30 bp, Artificial Sequence
  synthetic
ctgcaggtcgagtagattgctgttctacca

SEQ ID NO: 2186 - DNA, 36 bp, Artificial Sequence; identical to SEQ ID NO: 1244
  synthetic

SEQ ID NO: 2187 - DNA, 66 bp, Artificial Sequence
  synthetic
cctgcaggtcgagtagattgctgttctaccgttggaactgctctcattttggagggtaatcacaac

SEQ ID NO: 2188 - DNA, 30 bp, Artificial Sequence
  synthetic
cctgcaggtcgagtagattgctgttctacc

SEQ ID NO: 2189 - DNA, 36 bp, Artificial Sequence; identical to SEQ ID NO: 1244
  synthetic

SEQ ID NO: 2190 - DNA, 66 bp, Artificial Sequence
  synthetic
gcctgcaggtcgagtagattgctgttctacgttggaactgctctcattttggagggtaatcacaac

SEQ ID NO: 2191 - DNA, 30 bp, Artificial Sequence
  synthetic
gcctgcaggtcgagtagattgctgttctac

SEQ ID NO: 2192 - DNA, 36 bp, Artificial Sequence; identical to SEQ ID NO: 1244
  synthetic

SEQ ID NO: 2193 - DNA, 66 bp, Artificial Sequence
  synthetic
tgcctgcaggtcgagtagattgctgttctagttggaactgctctcattttggagggtaatcacaac

SEQ ID NO: 2194 - DNA, 30 bp, Artificial Sequence
  synthetic
tgcctgcaggtcgagtagattgctgttcta

SEQ ID NO: 2195 - DNA, 36 bp, Artificial Sequence; identical to SEQ ID NO: 1244
  synthetic

SEQ ID NO: 2196 - DNA, 66 bp, Artificial Sequence
  synthetic
catgcctgcaggtcgagtagattgctgttcgttggaactgctctcattttggagggtaatcacaac

SEQ ID NO: 2197 - DNA, 30 bp, Artificial Sequence
  synthetic
catgcctgcaggtcgagtagattgctgttc

SEQ ID NO: 2198 - DNA, 36 bp, Artificial Sequence; identical to SEQ ID NO: 1244
  synthetic

SEQ ID NO: 2199 - DNA, 66 bp, Artificial Sequence
  synthetic
gcatgcctgcaggtcgagtagattgctgttgttggaactgctctcattttggagggtaatcacaac

SEQ ID NO: 2200 - DNA, 30 bp, Artificial Sequence
  synthetic
gcatgcctgcaggtcgagtagattgctgtt

SEQ ID NO: 2201 - DNA, 36 bp, Artificial Sequence; identical to SEQ ID NO: 1244
  synthetic

SEQ ID NO: 2202 - DNA, 66 bp, Artificial Sequence
  synthetic
tgcatgcctgcaggtcgagtagattgctgtgttggaactgctctcattttggagggtaatcacaac

SEQ ID NO: 2203 - DNA, 30 bp, Artificial Sequence
  synthetic
tgcatgcctgcaggtcgagtagattgctgt

SEQ ID NO: 2204 - DNA, 36 bp, Artificial Sequence; identical to SEQ ID NO: 1244
  synthetic

SEQ ID NO: 2205 - DNA, 66 bp, Artificial Sequence
  synthetic
cttgcatgcctgcaggtcgagtagattgctgttggaactgctctcattttggagggtaatcacaac

SEQ ID NO: 2206 - DNA, 30 bp, Artificial Sequence
  synthetic
cttgcatgcctgcaggtcgagtagattgct

SEQ ID NO: 2207 - DNA, 36 bp, Artificial Sequence; identical to SEQ ID NO: 1244
  synthetic

SEQ ID NO: 2208 - DNA, 66 bp, Artificial Sequence
  synthetic
gcttgcatgcctgcaggtcgagtagattgcgttggaactgctctcattttggagggtaatcacaac

SEQ ID NO: 2209 - DNA, 30 bp, Artificial Sequence
  synthetic
gcttgcatgcctgcaggtcgagtagattgc

SEQ ID NO: 2210 - DNA, 36 bp, Artificial Sequence; identical to SEQ ID NO: 1244
  synthetic

SEQ ID NO: 2211 - DNA, 66 bp, Artificial Sequence
  synthetic
agcttgcatgcctgcaggtcgagtagattggttggaactgctctcattttggagggtaatcacaac

SEQ ID NO: 2212 - DNA, 30 bp, Artificial Sequence
  synthetic
agcttgcatgcctgcaggtcgagtagattg

SEQ ID NO: 2213 - DNA, 36 bp, Artificial Sequence; identical to SEQ ID NO: 1244
  synthetic

SEQ ID NO: 2214 - DNA, 66 bp, Artificial Sequence
  synthetic
aagcttgcatgcctgcaggtcgagtagattgttggaactgctctcattttggagggtaatcacaac

SEQ ID NO: 2215 - DNA, 30 bp, Artificial Sequence
  synthetic
aagcttgcatgcctgcaggtcgagtagatt

SEQ ID NO: 2216 - DNA, 36 bp, Artificial Sequence; identical to SEQ ID NO: 1244
  synthetic

SEQ ID NO: 2217 - DNA, 66 bp, Artificial Sequence
  synthetic
caagcttgcatgcctgcaggtcgagtagatgttggaactgctctcattttggagggtaatcacaac

SEQ ID NO: 2218 - DNA, 30 bp, Artificial Sequence
  synthetic
caagcttgcatgcctgcaggtcgagtagat

SEQ ID NO: 2219 - DNA, 36 bp, Artificial Sequence; identical to SEQ ID NO: 1244
  synthetic

SEQ ID NO: 2220 - DNA, 66 bp, Artificial Sequence
  synthetic
ccaagcttgcatgcctgcaggtcgagtagagttggaactgctctcattttggagggtaatcacaac

SEQ ID NO: 2221 - DNA, 30 bp, Artificial Sequence
  synthetic
ccaagcttgcatgcctgcaggtcgagtaga

SEQ ID NO: 2222 - DNA, 36 bp, Artificial Sequence; identical to SEQ ID NO: 1244
  synthetic

SEQ ID NO: 2223 - DNA, 66 bp, Artificial Sequence
  synthetic
gccaagcttgcatgcctgcaggtcgagtaggttggaactgctctcattttggagggtaatcacaac

SEQ ID NO: 2224 - DNA, 30 bp, Artificial Sequence
  synthetic
gccaagcttgcatgcctgcaggtcgagtag

SEQ ID NO: 2225 - DNA, 36 bp, Artificial Sequence; identical to SEQ ID NO: 1244
  synthetic

SEQ ID NO: 2226 - DNA, 66 bp, Artificial Sequence
  synthetic
cgccaagcttgcatgcctgcaggtcgagtagttggaactgctctcattttggagggtaatcacaac

SEQ ID NO: 2227 - DNA, 30 bp, Artificial Sequence
  synthetic
cgccaagcttgcatgcctgcaggtcgagta

SEQ ID NO: 2228 - DNA, 36 bp, Artificial Sequence; identical to SEQ ID NO: 1244
  synthetic

SEQ ID NO: 2229 - DNA, 66 bp, Artificial Sequence
  synthetic
tacgccaagcttgcatgcctgcaggtcgaggttggaactgctctcattttggagggtaatcacaac

SEQ ID NO: 2230 - DNA, 30 bp, Artificial Sequence
  synthetic
tacgccaagcttgcatgcctgcaggtcgag

SEQ ID NO: 2231 - DNA, 36 bp, Artificial Sequence; identical to SEQ ID NO: 1244
  synthetic

SEQ ID NO: 2232 - DNA, 66 bp, Artificial Sequence
  synthetic
ttacgccaagcttgcatgcctgcaggtcgagttggaactgctctcattttggagggtaatcacaac

SEQ ID NO: 2233 - DNA, 30 bp, Artificial Sequence
  synthetic
ttacgccaagcttgcatgcctgcaggtcga

SEQ ID NO: 2234 - DNA, 36 bp, Artificial Sequence; identical to SEQ ID NO: 1244
  synthetic

SEQ ID NO: 2235 - DNA, 66 bp, Artificial Sequence
  synthetic
attacgccaagcttgcatgcctgcaggtcggttggaactgctctcattttggagggtaatcacaac

SEQ ID NO: 2236 - DNA, 30 bp, Artificial Sequence
  synthetic
attacgccaagcttgcatgcctgcaggtcg

SEQ ID NO: 2237 - DNA, 36 bp, Artificial Sequence; identical to SEQ ID NO: 1244
  synthetic

SEQ ID NO: 2238 - DNA, 66 bp, Artificial Sequence
  synthetic
gattacgccaagcttgcatgcctgcaggtcgttggaactgctctcattttggagggtaatcacaac

SEQ ID NO: 2239 - DNA, 30 bp, Artificial Sequence
  synthetic
gattacgccaagcttgcatgcctgcaggtc

SEQ ID NO: 2240 - DNA, 36 bp, Artificial Sequence; identical to SEQ ID NO: 1244
  synthetic

SEQ ID NO: 2241 - DNA, 66 bp, Artificial Sequence
  synthetic
tgattacgccaagcttgcatgcctgcaggtgttggaactgctctcattttggagggtaatcacaac

SEQ ID NO: 2242 - DNA, 30 bp, Artificial Sequence
  synthetic
tgattacgccaagcttgcatgcctgcaggt

SEQ ID NO: 2243 - DNA, 36 bp, Artificial Sequence; identical to SEQ ID NO: 1244
  synthetic

SEQ ID NO: 2244 - DNA, 66 bp, Artificial Sequence
  synthetic
atgattacgccaagcttgcatgcctgcagggttggaactgctctcattttggagggtaatcacaac

SEQ ID NO: 2245 - DNA, 30 bp, Artificial Sequence
  synthetic
atgattacgccaagcttgcatgcctgcagg

SEQ ID NO: 2246 - DNA, 36 bp, Artificial Sequence; identical to SEQ ID NO: 1244
  synthetic

SEQ ID NO: 2247 - DNA, 66 bp, Artificial Sequence
  synthetic
catgattacgccaagcttgcatgcctgcaggttggaactgctctcattttggagggtaatcacaac

SEQ ID NO: 2248 - DNA, 30 bp, Artificial Sequence
  synthetic
catgattacgccaagcttgcatgcctgcag

SEQ ID NO: 2249 - DNA, 36 bp, Artificial Sequence; identical to SEQ ID NO: 1244
  synthetic

SEQ ID NO: 2250 - DNA, 66 bp, Artificial Sequence
  synthetic
accatgattacgccaagcttgcatgcctgcgttggaactgctctcattttggagggtaatcacaac

SEQ ID NO: 2251 - DNA, 30 bp, Artificial Sequence
  synthetic
accatgattacgccaagcttgcatgcctgc

SEQ ID NO: 2252 - DNA, 36 bp, Artificial Sequence; identical to SEQ ID NO: 1244
  synthetic

SEQ ID NO: 2253 - DNA, 66 bp, Artificial Sequence
  synthetic
gaccatgattacgccaagcttgcatgcctggttggaactgctctcattttggagggtaatcacaac

SEQ ID NO: 2254 - DNA, 30 bp, Artificial Sequence
  synthetic
gaccatgattacgccaagcttgcatgcctg

SEQ ID NO: 2255 - DNA, 36 bp, Artificial Sequence; identical to SEQ ID NO: 1244
  synthetic

SEQ ID NO: 2256 - DNA, 66 bp, Artificial Sequence
  synthetic
tgaccatgattacgccaagcttgcatgcctgttggaactgctctcattttggagggtaatcacaac

SEQ ID NO: 2257 - DNA, 30 bp, Artificial Sequence
  synthetic
tgaccatgattacgccaagcttgcatgcct

SEQ ID NO: 2258 - DNA, 36 bp, Artificial Sequence; identical to SEQ ID NO: 1244
  synthetic

SEQ ID NO: 2259 - DNA, 66 bp, Artificial Sequence
  synthetic
atgaccatgattacgccaagcttgcatgccgttggaactgctctcattttggagggtaatcacaac

SEQ ID NO: 2260 - DNA, 30 bp, Artificial Sequence
  synthetic
atgaccatgattacgccaagcttgcatgcc

SEQ ID NO: 2261 - DNA, 36 bp, Artificial Sequence; identical to SEQ ID NO: 1244
  synthetic

SEQ ID NO: 2262 - DNA, 66 bp, Artificial Sequence
  synthetic
ctatgaccatgattacgccaagcttgcatggttggaactgctctcattttggagggtaatcacaac

SEQ ID NO: 2263 - DNA, 30 bp, Artificial Sequence
  synthetic
ctatgaccatgattacgccaagcttgcatg

SEQ ID NO: 2264 - DNA, 36 bp, Artificial Sequence; identical to SEQ ID NO: 1244
  synthetic

SEQ ID NO: 2265 - DNA, 66 bp, Artificial Sequence
  synthetic
gctatgaccatgattacgccaagcttgcatgttggaactgctctcattttggagggtaatcacaac

SEQ ID NO: 2266 - DNA, 30 bp, Artificial Sequence
  synthetic
gctatgaccatgattacgccaagcttgcat

SEQ ID NO: 2267 - DNA, 36 bp, Artificial Sequence; identical to SEQ ID NO: 1244
  synthetic

SEQ ID NO: 2268 - DNA, 66 bp, Artificial Sequence
  synthetic
acagctatgaccatgattacgccaagcttggttggaactgctctcattttggagggtaatcacaac

SEQ ID NO: 2269 - DNA, 30 bp, Artificial Sequence
  synthetic
acagctatgaccatgattacgccaagcttg

SEQ ID NO: 2270 - DNA, 36 bp, Artificial Sequence; identical to SEQ ID NO: 1244
  synthetic

SEQ ID NO: 2271 - DNA, 66 bp, Artificial Sequence
  synthetic
aacagctatgaccatgattacgccaagcttgttggaactgctctcattttggagggtaatcacaac

SEQ ID NO: 2272 - DNA, 30 bp, Artificial Sequence
  synthetic
aacagctatgaccatgattacgccaagctt

SEQ ID NO: 2273 - DNA, 36 bp, Artificial Sequence; identical to SEQ ID NO: 1244
  synthetic

SEQ ID NO: 2274 - DNA, 66 bp, Artificial Sequence
  synthetic
aaacagctatgaccatgattacgccaagctgttggaactgctctcattttggagggtaatcacaac

SEQ ID NO: 2275 - DNA, 30 bp, Artificial Sequence
  synthetic
aaacagctatgaccatgattacgccaagct

SEQ ID NO: 2276 - DNA, 36 bp, Artificial Sequence; identical to SEQ ID NO: 1244
  synthetic

SEQ ID NO: 2277 - DNA, 66 bp, Artificial Sequence
  synthetic
gaaacagctatgaccatgattacgccaagcgttggaactgctctcattttggagggtaatcacaac

SEQ ID NO: 2278 - DNA, 30 bp, Artificial Sequence
  synthetic
gaaacagctatgaccatgattacgccaagc

SEQ ID NO: 2279 - DNA, 36 bp, Artificial Sequence; identical to SEQ ID NO: 1244
  synthetic

SEQ ID NO: 2280 - DNA, 66 bp, Artificial Sequence
  synthetic
caggaaacagctatgaccatgattacgccagttggaactgctctcattttggagggtaatcacaac

SEQ ID NO: 2281 - DNA, 30 bp, Artificial Sequence
  synthetic
caggaaacagctatgaccatgattacgcca

SEQ ID NO: 2282 - DNA, 36 bp, Artificial Sequence; identical to SEQ ID NO: 1244
  synthetic

SEQ ID NO: 2283 - DNA, 66 bp, Artificial Sequence
  synthetic
acaggaaacagctatgaccatgattacgccgttggaactgctctcattttggagggtaatcacaac

SEQ ID NO: 2284 - DNA, 30 bp, Artificial Sequence
  synthetic
acaggaaacagctatgaccatgattacgcc

SEQ ID NO: 2285 - DNA, 36 bp, Artificial Sequence; identical to SEQ ID NO: 1244
  synthetic

SEQ ID NO: 2286 - DNA, 66 bp, Artificial Sequence
  synthetic
cacaggaaacagctatgaccatgattacgcgttggaactgctctcattttggagggtaatcacaac

SEQ ID NO: 2287 - DNA, 30 bp, Artificial Sequence
  synthetic
cacaggaaacagctatgaccatgattacgc

SEQ ID NO: 2288 - DNA, 36 bp, Artificial Sequence; identical to SEQ ID NO: 1244
  synthetic

SEQ ID NO: 2289 - DNA, 66 bp, Artificial Sequence
  synthetic
taaacacaggaaacagctatgaccatgattgttggaactgctctcattttggagggtaatcacaac

SEQ ID NO: 2290 - DNA, 30 bp, Artificial Sequence
  synthetic
taaacacaggaaacagctatgaccatgatt

SEQ ID NO: 2291 - DNA, 36 bp, Artificial Sequence; identical to SEQ ID NO: 1244
  synthetic

SEQ ID NO: 2292 - DNA, 66 bp, Artificial Sequence
  synthetic
gataaacacaggaaacagctatgaccatgagttggaactgctctcattttggagggtaatcacaac

SEQ ID NO: 2293 - DNA, 30 bp, Artificial Sequence
  synthetic
gataaacacaggaaacagctatgaccatga

SEQ ID NO: 2294 - DNA, 36 bp, Artificial Sequence; identical to SEQ ID NO: 1244
  synthetic

SEQ ID NO: 2295 - DNA, 66 bp, Artificial Sequence
  synthetic
ggataaacacaggaaacagctatgaccatggttggaactgctctcattttggagggtaatcacaac

SEQ ID NO: 2296 - DNA, 30 bp, Artificial Sequence
  synthetic
ggataaacacaggaaacagctatgaccatg

SEQ ID NO: 2297 - DNA, 36 bp, Artificial Sequence; identical to SEQ ID NO: 1244
  synthetic

SEQ ID NO: 2298 - DNA, 66 bp, Artificial Sequence
  synthetic
cggataaacacaggaaacagctatgaccatgttggaactgctctcattttggagggtaatcacaac

SEQ ID NO: 2299 - DNA, 30 bp, Artificial Sequence
  synthetic
cggataaacacaggaaacagctatgaccat

SEQ ID NO: 2300 - DNA, 36 bp, Artificial Sequence; identical to SEQ ID NO: 1244
  synthetic

SEQ ID NO: 2301 - DNA, 66 bp, Artificial Sequence
  synthetic
gcggataaacacaggaaacagctatgaccagttggaactgctctcattttggagggtaatcacaac

SEQ ID NO: 2302 - DNA, 30 bp, Artificial Sequence
  synthetic
gcggataaacacaggaaacagctatgacca

SEQ ID NO: 2303 - DNA, 36 bp, Artificial Sequence; identical to SEQ ID NO: 1244
  synthetic

SEQ ID NO: 2304 - DNA, 66 bp, Artificial Sequence
  synthetic
agcggataaacacaggaaacagctatgaccgttggaactgctctcattttggagggtaatcacaac

SEQ ID NO: 2305 - DNA, 30 bp, Artificial Sequence
  synthetic
agcggataaacacaggaaacagctatgacc

SEQ ID NO: 2306 - DNA, 36 bp, Artificial Sequence; identical to SEQ ID NO: 1244
  synthetic

SEQ ID NO: 2307 - DNA, 66 bp, Artificial Sequence
  synthetic
gagcggataaacacaggaaacagctatgacgttggaactgctctcattttggagggtaatcacaac

SEQ ID NO: 2308 - DNA, 30 bp, Artificial Sequence
  synthetic
gagcggataaacacaggaaacagctatgac

SEQ ID NO: 2309 - DNA, 36 bp, Artificial Sequence; identical to SEQ ID NO: 1244
  synthetic

SEQ ID NO: 2310 - DNA, 66 bp, Artificial Sequence
  synthetic
tgagcggataaacacaggaaacagctatgagttggaactgctctcattttggagggtaatcacaac

SEQ ID NO: 2311 - DNA, 30 bp, Artificial Sequence
  synthetic
tgagcggataaacacaggaaacagctatga

SEQ ID NO: 2312 - DNA, 36 bp, Artificial Sequence; identical to SEQ ID NO: 1244
  synthetic

SEQ ID NO: 2313 - DNA, 66 bp, Artificial Sequence
  synthetic
tgtgagcggataaacacaggaaacagctatgttggaactgctctcattttggagggtaatcacaac

SEQ ID NO: 2314 - DNA, 30 bp, Artificial Sequence
  synthetic
tgtgagcggataaacacaggaaacagctat

SEQ ID NO: 2315 - DNA, 36 bp, Artificial Sequence; identical to SEQ ID NO: 1244
  synthetic

SEQ ID NO: 2316 - DNA, 66 bp, Artificial Sequence
  synthetic
attgtgagcggataaacacaggaaacagctgttggaactgctctcattttggagggtaatcacaac

SEQ ID NO: 2317 - DNA, 30 bp, Artificial Sequence
  synthetic
attgtgagcggataaacacaggaaacagct

SEQ ID NO: 2318 - DNA, 36 bp, Artificial Sequence; identical to SEQ ID NO: 1244
  synthetic

SEQ ID NO: 2319 - DNA, 66 bp, Artificial Sequence
  synthetic
aattgtgagcggataaacacaggaaacagcgttggaactgctctcattttggagggtaatcacaac

SEQ ID NO: 2320 - DNA, 30 bp, Artificial Sequence
  synthetic
aattgtgagcggataaacacaggaaacagc

SEQ ID NO: 2321 - DNA, 36 bp, Artificial Sequence; identical to SEQ ID NO: 1244
  synthetic

SEQ ID NO: 2322 - DNA, 66 bp, Artificial Sequence
  synthetic
gaattgtgagcggataaacacaggaaacaggttggaactgctctcattttggagggtaatcacaac

SEQ ID NO: 2323 - DNA, 30 bp, Artificial Sequence
  synthetic
gaattgtgagcggataaacacaggaaacag

SEQ ID NO: 2324 - DNA, 36 bp, Artificial Sequence; identical to SEQ ID NO: 1244
  synthetic

SEQ ID NO: 2325 - DNA, 66 bp, Artificial Sequence
  synthetic
gtggaattgtgagcggataaacacaggaaagttggaactgctctcattttggagggtaatcacaac

SEQ ID NO: 2326 - DNA, 30 bp, Artificial Sequence
  synthetic
gtggaattgtgagcggataaacacaggaaa

SEQ ID NO: 2327 - DNA, 36 bp, Artificial Sequence; identical to SEQ ID NO: 1244
  synthetic

SEQ ID NO: 2328 - DNA, 66 bp, Artificial Sequence
  synthetic
tgtggaattgtgagcggataaacacaggaagttggaactgctctcattttggagggtaatcacaac

SEQ ID NO: 2329 - DNA, 30 bp, Artificial Sequence
  synthetic
tgtggaattgtgagcggataaacacaggaa

SEQ ID NO: 2330 - DNA, 36 bp, Artificial Sequence; identical to SEQ ID NO: 1244
  synthetic

SEQ ID NO: 2331 - DNA, 66 bp, Artificial Sequence
  synthetic
gtgtggaattgtgagcggataaacacaggagttggaactgctctcattttggagggtaatcacaac

SEQ ID NO: 2332 - DNA, 30 bp, Artificial Sequence
  synthetic
gtgtggaattgtgagcggataaacacagga

SEQ ID NO: 2333 - DNA, 36 bp, Artificial Sequence; identical to SEQ ID NO: 1244
  synthetic

SEQ ID NO: 2334 - DNA, 66 bp, Artificial Sequence
  synthetic
tgtgtggaattgtgagcggataaacacagggttggaactgctctcattttggagggtaatcacaac

SEQ ID NO: 2335 - DNA, 30 bp, Artificial Sequence
  synthetic
tgtgtggaattgtgagcggataaacacagg

SEQ ID NO: 2336 - DNA, 36 bp, Artificial Sequence; identical to SEQ ID NO: 1244
  synthetic

SEQ ID NO: 2337 - DNA, 66 bp, Artificial Sequence
  synthetic
gttgtgtggaattgtgagcggataaacacagttggaactgctctcattttggagggtaatcacaac

SEQ ID NO: 2338 - DNA, 30 bp, Artificial Sequence
  synthetic
gttgtgtggaattgtgagcggataaacaca

SEQ ID NO: 2339 - DNA, 36 bp, Artificial Sequence; identical to SEQ ID NO: 1244
  synthetic

SEQ ID NO: 2340 - DNA, 66 bp, Artificial Sequence
  synthetic
tgttgtgtggaattgtgagcggataaacacgttggaactgctctcattttggagggtaatcacaac

SEQ ID NO: 2341 - DNA, 30 bp, Artificial Sequence
  synthetic
tgttgtgtggaattgtgagcggataaacac

SEQ ID NO: 2342 - DNA, 36 bp, Artificial Sequence; identical to SEQ ID NO: 1244
  synthetic

SEQ ID NO: 2343 - DNA, 66 bp, Artificial Sequence
  synthetic
atgttgtgtggaattgtgagcggataaacagttggaactgctctcattttggagggtaatcacaac

SEQ ID NO: 2344 - DNA, 30 bp, Artificial Sequence
  synthetic
atgttgtgtggaattgtgagcggataaaca

SEQ ID NO: 2345 - DNA, 36 bp, Artificial Sequence; identical to SEQ ID NO: 1244
  synthetic

SEQ ID NO: 2346 - DNA, 66 bp, Artificial Sequence
  synthetic
gtatgttgtgtggaattgtgagcggataaagttggaactgctctcattttggagggtaatcacaac

SEQ ID NO: 2347 - DNA, 30 bp, Artificial Sequence
  synthetic
gtatgttgtgtggaattgtgagcggataaa

SEQ ID NO: 2348 - DNA, 36 bp, Artificial Sequence; identical to SEQ ID NO: 1244
  synthetic

SEQ ID NO: 2349 - DNA, 66 bp, Artificial Sequence
  synthetic
cgtatgttgtgtggaattgtgagcggataagttggaactgctctcattttggagggtaatcacaac

SEQ ID NO: 2350 - DNA, 30 bp, Artificial Sequence
  synthetic
cgtatgttgtgtggaattgtgagcggataa

SEQ ID NO: 2351 - DNA, 36 bp, Artificial Sequence; identical to SEQ ID NO: 1244
  synthetic

SEQ ID NO: 2352 - DNA, 66 bp, Artificial Sequence
  synthetic
tcgtatgttgtgtggaattgtgagcggatagttggaactgctctcattttggagggtaatcacaac

SEQ ID NO: 2353 - DNA, 30 bp, Artificial Sequence
  synthetic
tcgtatgttgtgtggaattgtgagcggata

SEQ ID NO: 2354 - DNA, 36 bp, Artificial Sequence; identical to SEQ ID NO: 1244
  synthetic

SEQ ID NO: 2355 - DNA, 66 bp, Artificial Sequence
  synthetic
gctcgtatgttgtgtggaattgtgagcggagttggaactgctctcattttggagggtaatcacaac

SEQ ID NO: 2356 - DNA, 30 bp, Artificial Sequence
  synthetic
gctcgtatgttgtgtggaattgtgagcgga

SEQ ID NO: 2357 - DNA, 36 bp, Artificial Sequence; identical to SEQ ID NO: 1244
  synthetic

SEQ ID NO: 2358 - DNA, 66 bp, Artificial Sequence
  synthetic
ggctcgtatgttgtgtggaattgtgagcgggttggaactgctctcattttggagggtaatcacaac

SEQ ID NO: 2359 - DNA, 30 bp, Artificial Sequence
  synthetic
ggctcgtatgttgtgtggaattgtgagcgg

SEQ ID NO: 2360 - DNA, 36 bp, Artificial Sequence; identical to SEQ ID NO: 1244
  synthetic

SEQ ID NO: 2361 - DNA, 66 bp, Artificial Sequence
  synthetic
ccggctcgtatgttgtgtggaattgtgagcgttggaactgctctcattttggagggtaatcacaac

SEQ ID NO: 2362 - DNA, 30 bp, Artificial Sequence
  synthetic
ccggctcgtatgttgtgtggaattgtgagc

SEQ ID NO: 2363 - DNA, 36 bp, Artificial Sequence; identical to SEQ ID NO: 1244
  synthetic

SEQ ID NO: 2364 - DNA, 66 bp, Artificial Sequence
  synthetic
tccggctcgtatgttgtgtggaattgtgaggttggaactgctctcattttggagggtaatcacaac

SEQ ID NO: 2365 - DNA, 30 bp, Artificial Sequence
  synthetic
tccggctcgtatgttgtgtggaattgtgag

SEQ ID NO: 2366 - DNA, 36 bp, Artificial Sequence; identical to SEQ ID NO: 1244
  synthetic

SEQ ID NO: 2367 - DNA, 66 bp, Artificial Sequence
  synthetic
ttccggctcgtatgttgtgtggaattgtgagttggaactgctctcattttggagggtaatcacaac

SEQ ID NO: 2368 - DNA, 30 bp, Artificial Sequence
  synthetic
ttccggctcgtatgttgtgtggaattgtga

SEQ ID NO: 2369 - DNA, 36 bp, Artificial Sequence; identical to SEQ ID NO: 1244
  synthetic

SEQ ID NO: 2370 - DNA, 66 bp, Artificial Sequence
  synthetic
gcttccggctcgtatgttgtgtggaattgtgttggaactgctctcattttggagggtaatcacaac

SEQ ID NO: 2371 - DNA, 30 bp, Artificial Sequence
  synthetic
gcttccggctcgtatgttgtgtggaattgt

SEQ ID NO: 2372 - DNA, 36 bp, Artificial Sequence; identical to SEQ ID NO: 1244
  synthetic

SEQ ID NO: 2373 - DNA, 65 bp, Artificial Sequence
  synthetic
gcttccggctcgtatgttgtgtggaattggttggaactgctctcattttggagggtaatcacaac

SEQ ID NO: 2374 - DNA, 30 bp, Artificial Sequence
  synthetic
tgcttccggctcgtatgttgtgtggaattg

SEQ ID NO: 2375 - DNA, 36 bp, Artificial Sequence; identical to SEQ ID NO: 1244
  synthetic

SEQ ID NO: 2376 - DNA, 66 bp, Artificial Sequence
  synthetic
atgcttccggctcgtatgttgtgtggaattgttggaactgctctcattttggagggtaatcacaac

SEQ ID NO: 2377 - DNA, 30 bp, Artificial Sequence
  synthetic
atgcttccggctcgtatgttgtgtggaatt

SEQ ID NO: 2378 - DNA, 36 bp, Artificial Sequence; identical to SEQ ID NO: 1244
  synthetic

SEQ ID NO: 2379 - DNA, 66 bp, Artificial Sequence
  synthetic
ttatgcttccggctcgtatgttgtgtggaagttggaactgctctcattttggagggtaatcacaac

SEQ ID NO: 2380 - DNA, 30 bp, Artificial Sequence
  synthetic
ttatgcttccggctcgtatgttgtgtggaa

SEQ ID NO: 2381 - DNA, 36 bp, Artificial Sequence; identical to SEQ ID NO: 1244
  synthetic

SEQ ID NO: 2382 - DNA, 66 bp, Artificial Sequence
  synthetic
tttatgcttccggctcgtatgttgtgtggagttggaactgctctcattttggagggtaatcacaac

SEQ ID NO: 2383 - DNA, 30 bp, Artificial Sequence
  synthetic
tttatgcttccggctcgtatgttgtgtgga

SEQ ID NO: 2384 - DNA, 36 bp, Artificial Sequence; identical to SEQ ID NO: 1244
  synthetic

SEQ ID NO: 2385 - DNA, 66 bp, Ebola Virus
aactgtgaaagacaactcttcactgcgaatgttggaactgctctcattttggagggtaatcacaac

SEQ ID NO: 2386 - DNA, 30 bp, Ebola Virus
aactgtgaaagacaactcttcactgcgaat

SEQ ID NO: 2387 - DNA, 36 bp, Ebola Virus; identical to SEQ ID NO: 1244

SEQ ID NO: 2388 - DNA, 66 bp, Ebola Virus
caactgtgaaagacaactcttcactgcgaagttggaactgctctcattttggagggtaatcacaac

SEQ ID NO: 2389 - DNA, 30 bp, Ebola Virus
caactgtgaaagacaactcttcactgcgaa

SEQ ID NO: 2390 - DNA, 36 bp, Ebola Virus; identical to SEQ ID NO: 1244

SEQ ID NO: 2391 - DNA, 66 bp, Ebola Virus
acaactgtgaaagacaactcttcactgcgagttggaactgctctcattttggagggtaatcacaac

SEQ ID NO: 2392 - DNA, 30 bp, Ebola Virus
acaactgtgaaagacaactcttcactgcga

SEQ ID NO: 2393 - DNA, 36 bp, Ebola Virus; identical to SEQ ID NO: 1244

SEQ ID NO: 2394 - DNA, 66 bp, Ebola Virus
atacaactgtgaaagacaactcttcactgcgttggaactgctctcattttggagggtaatcacaac

SEQ ID NO: 2395 - DNA, 30 bp, Ebola Virus
atacaactgtgaaagacaactcttcactgc

SEQ ID NO: 2396 - DNA, 36 bp, Ebola Virus; identical to SEQ ID NO: 1244

SEQ ID NO: 2397 - DNA, 66 bp, Ebola Virus
gatacaactgtgaaagacaactcttcactggttggaactgctctcattttggagggtaatcacaac

SEQ ID NO: 2398 - DNA, 30 bp, Ebola Virus
gatacaactgtgaaagacaactcttcactg

SEQ ID NO: 2399 - DNA, 36 bp, Ebola Virus; identical to SEQ ID NO: 1244

SEQ ID NO: 2400 - DNA, 66 bp, Ebola Virus
ttgatacaactgtgaaagacaactcttcacgttggaactgctctcattttggagggtaatcacaac

SEQ ID NO: 2401 - DNA, 30 bp, Ebola Virus
ttgatacaactgtgaaagacaactcttcac

SEQ ID NO: 2402 - DNA, 36 bp, Ebola Virus; identical to SEQ ID NO: 1244

SEQ ID NO: 2403 - DNA, 66 bp, Ebola Virus
tttgatacaactgtgaaagacaactcttcagttggaactgctctcattttggagggtaatcacaac

SEQ ID NO: 2404 - DNA, 30 bp, Ebola Virus
tttgatacaactgtgaaagacaactcttca

SEQ ID NO: 2405 - DNA, 36 bp, Ebola Virus; identical to SEQ ID NO: 1244

SEQ ID NO: 2406 - DNA, 66 bp, Ebola Virus
cgtttgatacaactgtgaaagacaactcttgttggaactgctctcattttggagggtaatcacaac

SEQ ID NO: 2407 - DNA, 30 bp, Ebola Virus
cgtttgatacaactgtgaaagacaactctt

SEQ ID NO: 2408 - DNA, 36 bp, Ebola Virus; identical to SEQ ID NO: 1244

SEQ ID NO: 2409 - DNA, 66 bp, Ebola Virus
ccgtttgatacaactgtgaaagacaactctgttggaactgctctcattttggagggtaatcacaac

SEQ ID NO: 2410 - DNA, 30 bp, Ebola Virus
ccgtttgatacaactgtgaaagacaactct

SEQ ID NO: 2411 - DNA, 36 bp, Ebola Virus; identical to SEQ ID NO: 1244

SEQ ID NO: 2412 - DNA, 66 bp, Ebola Virus
ctccgtttgatacaactgtgaaagacaactgttggaactgctctcattttggagggtaatcacaac

SEQ ID NO: 2413 - DNA, 30 bp, Ebola Virus
ctccgtttgatacaactgtgaaagacaact

SEQ ID NO: 2414 - DNA, 36 bp, Ebola Virus; identical to SEQ ID NO: 1244

SEQ ID NO: 2415 - DNA, 66 bp, Ebola Virus
gctccgtttgatacaactgtgaaagacaacgttggaactgctctcattttggagggtaatcacaac

SEQ ID NO: 2416 - DNA, 30 bp, Ebola Virus
gctccgtttgatacaactgtgaaagacaac

SEQ ID NO: 2417 - DNA, 36 bp, Ebola Virus; identical to SEQ ID NO: 1244

SEQ ID NO: 2418 - DNA, 66 bp, Ebola Virus
tggctccgtttgatacaactgtgaaagacagttggaactgctctcattttggagggtaatcacaac

SEQ ID NO: 2419 - DNA, 30 bp, Ebola Virus
tggctccgtttgatacaactgtgaaagaca

SEQ ID NO: 2420 - DNA, 36 bp, Ebola Virus; identical to SEQ ID NO: 1244

SEQ ID NO: 2421 - DNA, 66 bp, Ebola Virus
ttggctccgtttgatacaactgtgaaagacgttggaactgctctcattttggagggtaatcacaac

SEQ ID NO: 2422 - DNA, 30 bp, Ebola Virus
ttggctccgtttgatacaactgtgaaagac

SEQ ID NO: 2423 - DNA, 36 bp, Ebola Virus; identical to SEQ ID NO: 1244

SEQ ID NO: 2424 - DNA, 66 bp, Ebola Virus
tttggctccgtttgatacaactgtgaaagagttggaactgctctcattttggagggtaatcacaac

SEQ ID NO: 2425 - DNA, 30 bp, Ebola Virus
tttggctccgtttgatacaactgtgaaaga

SEQ ID NO: 2426 - DNA, 36 bp, Ebola Virus; identical to SEQ ID NO: 1244

SEQ ID NO: 2427 - DNA, 66 bp, Ebola Virus
tttttggctccgtttgatacaactgtgaaagttggaactgctctcattttggagggtaatcacaac

SEQ ID NO: 2428 - DNA, 30 bp, Ebola Virus
tttttggctccgtttgatacaactgtgaaa

SEQ ID NO: 2429 - DNA, 36 bp, Ebola Virus; identical to SEQ ID NO: 1244

SEQ ID NO: 2430 - DNA, 66 bp, Ebola Virus
gatgtttttggctccgtttgatacaactgtgttggaactgctctcattttggagggtaatcacaac

SEQ ID NO: 2431 - DNA, 30 bp, Ebola Virus
gatgtttttggctccgtttgatacaactgt

SEQ ID NO: 2432 - DNA, 36 bp, Ebola Virus; identical to SEQ ID NO: 1244

SEQ ID NO: 2433 - DNA, 66 bp, Ebola Virus
tgatgtttttggctccgtttgatacaactggttggaactgctctcattttggagggtaatcacaac

SEQ ID NO: 2434 - DNA, 30 bp, Ebola Virus
tgatgtttttggctccgtttgatacaactg

SEQ ID NO: 2435 - DNA, 36 bp, Ebola Virus; identical to SEQ ID NO: 1244

SEQ ID NO: 2436 - DNA, 66 bp, Ebola Virus
ctgatgtttttggctccgtttgatacaactgttggaactgctctcattttggagggtaatcacaac

SEQ ID NO: 2437 - DNA, 30 bp, Ebola Virus
ctgatgtttttggctccgtttgatacaact

SEQ ID NO: 2438 - DNA, 36 bp, Ebola Virus; identical to SEQ ID NO: 1244

SEQ ID NO: 2439 - DNA, 66 bp, Ebola Virus
actgatgtttttggctccgtttgatacaacgttggaactgctctcattttggagggtaatcacaac

SEQ ID NO: 2440 - DNA, 30 bp, Ebola Virus
actgatgtttttggctccgtttgatacaac

SEQ ID NO: 2441 - DNA, 36 bp, Ebola Virus; identical to SEQ ID NO: 1244

SEQ ID NO: 2442 - DNA, 66 bp, Ebola Virus
gaccactgatgtttttggctccgtttgatagttggaactgctctcattttggagggtaatcacaac

SEQ ID NO: 2443 - DNA, 30 bp, Ebola Virus
gaccactgatgtttttggctccgtttgata

SEQ ID NO: 2444 - DNA, 36 bp, Ebola Virus; identical to SEQ ID NO: 1244

SEQ ID NO: 2445 - DNA, 66 bp, Ebola Virus
tgaccactgatgtttttggctccgtttgatgttggaactgctctcattttggagggtaatcacaac

SEQ ID NO: 2446 - DNA, 30 bp, Ebola Virus
tgaccactgatgtttttggctccgtttgat

SEQ ID NO: 2447 - DNA, 36 bp, Ebola Virus; identical to SEQ ID NO: 1244

SEQ ID NO: 2448 - DNA, 66 bp, Ebola Virus
ctgaccactgatgtttttggctccgtttgagttggaactgctctcattttggagggtaatcacaac

SEQ ID NO: 2449 - DNA, 30 bp, Ebola Virus
ctgaccactgatgtttttggctccgtttga

SEQ ID NO: 2450 - DNA, 36 bp, Ebola Virus; identical to SEQ ID NO: 1244

SEQ ID NO: 2451 - DNA, 66 bp, Ebola Virus
ctctgaccactgatgtttttggctccgtttgttggaactgctctcattttggagggtaatcacaac

SEQ ID NO: 2452 - DNA, 30 bp, Ebola Virus
ctctgaccactgatgtttttggctccgttt

SEQ ID NO: 2453 - DNA, 36 bp, Ebola Virus; identical to SEQ ID NO: 1244

SEQ ID NO: 2454 - DNA, 66 bp, Ebola Virus
actctgaccactgatgtttttggctccgttgttggaactgctctcattttggagggtaatcacaac

SEQ ID NO: 2455 - DNA, 30 bp, Ebola Virus
actctgaccactgatgtttttggctccgtt

SEQ ID NO: 2456 - DNA, 36 bp, Ebola Virus; identical to SEQ ID NO: 1244

SEQ ID NO: 2457 - DNA, 66 bp, Ebola Virus
gactctgaccactgatgtttttggctccgtgttggaactgctctcattttggagggtaatcacaac

SEQ ID NO: 2458 - DNA, 30 bp, Ebola Virus
gactctgaccactgatgtttttggctccgt

SEQ ID NO: 2459 - DNA, 36 bp, Ebola Virus; identical to SEQ ID NO: 1244

SEQ ID NO: 2460 - DNA, 66 bp, Ebola Virus
cggactctgaccactgatgtttttggctccgttggaactgctctcattttggagggtaatcacaac

SEQ ID NO: 2461 - DNA, 30 bp, Ebola Virus
cggactctgaccactgatgtttttggctcc

SEQ ID NO: 2462 - DNA, 36 bp, Ebola Virus; identical to SEQ ID NO: 1244

SEQ ID NO: 2463 - DNA, 66 bp, Ebola Virus
gccggactctgaccactgatgtttttggctgttggaactgctctcattttggagggtaatcacaac

SEQ ID NO: 2464 - DNA, 30 bp, Ebola Virus
gccggactctgaccactgatgtttttggct

SEQ ID NO: 2465 - DNA, 36 bp, Ebola Virus; identical to SEQ ID NO: 1244

SEQ ID NO: 2466 - DNA, 66 bp, Ebola Virus
cgccggactctgaccactgatgtttttggcgttggaactgctctcattttggagggtaatcacaac

SEQ ID NO: 2467 - DNA, 30 bp, Ebola Virus
cgccggactctgaccactgatgtttttggc

SEQ ID NO: 2468 - DNA, 36 bp, Ebola Virus; identical to SEQ ID NO: 1244

SEQ ID NO: 2469 - DNA, 66 bp, Ebola Virus
gcgccggactctgaccactgatgtttttgggttggaactgctctcattttggagggtaatcacaac

SEQ ID NO: 2470 - DNA, 30 bp, Ebola Virus
gcgccggactctgaccactgatgtttttgg

SEQ ID NO: 2471 - DNA, 36 bp, Ebola Virus; identical to SEQ ID NO: 1244

SEQ ID NO: 2472 - DNA, 66 bp, Ebola Virus
cgcgccggactctgaccactgatgtttttggttggaactgctctcattttggagggtaatcacaac

SEQ ID NO: 2473 - DNA, 30 bp, Ebola Virus
cgcgccggactctgaccactgatgtttttg

SEQ ID NO: 2474 - DNA, 36 bp, Ebola Virus; identical to SEQ ID NO: 1244

SEQ ID NO: 2475 - DNA, 66 bp, Ebola Virus
ttcgcgccggactctgaccactgatgttttgttggaactgctctcattttggagggtaatcacaac

SEQ ID NO: 2476 - DNA, 30 bp, Ebola Virus
ttcgcgccggactctgaccactgatgtttt

SEQ ID NO: 2477 - DNA, 36 bp, Ebola Virus; identical to SEQ ID NO: 1244

SEQ ID NO: 2478 - DNA, 66 bp, Ebola Virus
agttcgcgccggactctgaccactgatgttgttggaactgctctcattttggagggtaatcacaac

SEQ ID NO: 2479 - DNA, 30 bp, Ebola Virus
agttcgcgccggactctgaccactgatgtt

SEQ ID NO: 2480 - DNA, 36 bp, Ebola Virus; identical to SEQ ID NO: 1244

SEQ ID NO: 2481 - DNA, 66 bp, Ebola Virus
aagttcgcgccggactctgaccactgatgtgttggaactgctctcattttggagggtaatcacaac

SEQ ID NO: 2482 - DNA, 30 bp, Ebola Virus
aagttcgcgccggactctgaccactgatgt

SEQ ID NO: 2483 - DNA, 36 bp, Ebola Virus; identical to SEQ ID NO: 1244

SEQ ID NO: 2484 - DNA, 66 bp, Ebola Virus
gaagttcgcgccggactctgaccactgatggttggaactgctctcattttggagggtaatcacaac

SEQ ID NO: 2485 - DNA, 30 bp, Ebola Virus
gaagttcgcgccggactctgaccactgatg

SEQ ID NO: 2486 - DNA, 36 bp, Ebola Virus; identical to SEQ ID NO: 1244

SEQ ID NO: 2487 - DNA, 66 bp, Ebola Virus
agaagttcgcgccggactctgaccactgatgttggaactgctctcattttggagggtaatcacaac

SEQ ID NO: 2488 - DNA, 30 bp, Ebola Virus
agaagttcgcgccggactctgaccactgat

SEQ ID NO: 2489 - DNA, 36 bp, Ebola Virus; identical to SEQ ID NO: 1244

SEQ ID NO: 2490 - DNA, 66 bp, Ebola Virus
gaagaagttcgcgccggactctgaccactggttggaactgctctcattttggagggtaatcacaac

SEQ ID NO: 2491 - DNA, 30 bp, Ebola Virus
gaagaagttcgcgccggactctgaccactg

SEQ ID NO: 2492 - DNA, 36 bp, Ebola Virus; identical to SEQ ID NO: 1244

SEQ ID NO: 2493 - DNA, 66 bp, Ebola Virus
ggaagaagttcgcgccggactctgaccactgttggaactgctctcattttggagggtaatcacaac

SEQ ID NO: 2494 - DNA, 30 bp, Ebola Virus
ggaagaagttcgcgccggactctgaccact

SEQ ID NO: 2495 - DNA, 36 bp, Ebola Virus; identical to SEQ ID NO: 1244

SEQ ID NO: 2496 - DNA, 66 bp, Ebola Virus
tcggaagaagttcgcgccggactctgaccagttggaactgctctcattttggagggtaatcacaac

SEQ ID NO: 2497 - DNA, 30 bp, Ebola Virus
tcggaagaagttcgcgccggactctgacca

SEQ ID NO: 2498 - DNA, 36 bp, Ebola Virus; identical to SEQ ID NO: 1244

SEQ ID NO: 2499 - DNA, 66 bp, Ebola Virus
gtcggaagaagttcgcgccggactctgaccgttggaactgctctcattttggagggtaatcacaac

SEQ ID NO: 2500 - DNA, 30 bp, Ebola Virus
gtcggaagaagttcgcgccggactctgacc

SEQ ID NO: 2501 - DNA, 36 bp, Ebola Virus; identical to SEQ ID NO: 1244

SEQ ID NO: 2502 - DNA, 66 bp, Ebola Virus
ggtcggaagaagttcgcgccggactctgacgttggaactgctctcattttggagggtaatcacaac

SEQ ID NO: 2503 - DNA, 30 bp, Ebola Virus
ggtcggaagaagttcgcgccggactctgac

SEQ ID NO: 2504 - DNA, 36 bp, Ebola Virus; identical to SEQ ID NO: 1244

SEQ ID NO: 2505 - DNA, 66 bp, Ebola Virus
gggtcggaagaagttcgcgccggactctgagttggaactgctctcattttggagggtaatcacaac

SEQ ID NO: 2506 - DNA, 30 bp, Ebola Virus
gggtcggaagaagttcgcgccggactctga

SEQ ID NO: 2507 - DNA, 36 bp, Ebola Virus; identical to SEQ ID NO: 1244

SEQ ID NO: 2508 - DNA, 66 bp, Ebola Virus
tgggtcggaagaagttcgcgccggactctggttggaactgctctcattttggagggtaatcacaac

SEQ ID NO: 2509 - DNA, 30 bp, Ebola Virus
tgggtcggaagaagttcgcgccggactctg

SEQ ID NO: 2510 - DNA, 36 bp, Ebola Virus; identical to SEQ ID NO: 1244

SEQ ID NO: 2511 - DNA, 66 bp, Ebola Virus
ccctgggtcggaagaagttcgcgccggactgttggaactgctctcattttggagggtaatcacaac

SEQ ID NO: 2512 - DNA, 30 bp, Ebola Virus
ccctgggtcggaagaagttcgcgccggact

SEQ ID NO: 2513 - DNA, 36 bp, Ebola Virus; identical to SEQ ID NO: 1244

SEQ ID NO: 2514 - DNA, 66 bp, Ebola Virus
tccctgggtcggaagaagttcgcgccggacgttggaactgctctcattttggagggtaatcacaac

SEQ ID NO: 2515 - DNA, 30 bp, Ebola Virus
tccctgggtcggaagaagttcgcgccggac

SEQ ID NO: 2516 - DNA, 36 bp, Ebola Virus; identical to SEQ ID NO: 1244

SEQ ID NO: 2517 - DNA, 66 bp, Ebola Virus
gtccctgggtcggaagaagttcgcgccggagttggaactgctctcattttggagggtaatcacaac

SEQ ID NO: 2518 - DNA, 30 bp, Ebola Virus
gtccctgggtcggaagaagttcgcgccgga

SEQ ID NO: 2519 - DNA, 36 bp, Ebola Virus; identical to SEQ ID NO: 1244

SEQ ID NO: 2520 - DNA, 66 bp, Ebola Virus
ggtccctgggtcggaagaagttcgcgccgggttggaactgctctcattttggagggtaatcacaac

SEQ ID NO: 2521 - DNA, 30 bp, Ebola Virus
ggtccctgggtcggaagaagttcgcgccgg

SEQ ID NO: 2522 - DNA, 36 bp, Ebola Virus; identical to SEQ ID NO: 1244

SEQ ID NO: 2523 - DNA, 66 bp, Ebola Virus
tggtccctgggtcggaagaagttcgcgccggttggaactgctctcattttggagggtaatcacaac

SEQ ID NO: 2524 - DNA, 30 bp, Ebola Virus
tggtccctgggtcggaagaagttcgcgccg

SEQ ID NO: 2525 - DNA, 36 bp, Ebola Virus; identical to SEQ ID NO: 1244

SEQ ID NO: 2526 - DNA, 66 bp, Ebola Virus
ttggtccctgggtcggaagaagttcgcgccgttggaactgctctcattttggagggtaatcacaac

SEQ ID NO: 2527 - DNA, 30 bp, Ebola Virus
ttggtccctgggtcggaagaagttcgcgcc

SEQ ID NO: 2528 - DNA, 36 bp, Ebola Virus; identical to SEQ ID NO: 1244

SEQ ID NO: 2529 - DNA, 66 bp, Ebola Virus
gtgttggtccctgggtcggaagaagttcgcgttggaactgctctcattttggagggtaatcacaac

SEQ ID NO: 2530 - DNA, 30 bp, Ebola Virus
gtgttggtccctgggtcggaagaagttcgc

SEQ ID NO: 2531 - DNA, 36 bp, Ebola Virus; identical to SEQ ID NO: 1244

SEQ ID NO: 2532 - DNA, 66 bp, Ebola Virus
tgtgttggtccctgggtcggaagaagttcggttggaactgctctcattttggagggtaatcacaac

SEQ ID NO: 2533 - DNA, 30 bp, Ebola Virus
tgtgttggtccctgggtcggaagaagttcg

SEQ ID NO: 2534 - DNA, 36 bp, Ebola Virus; identical to SEQ ID NO: 1244

SEQ ID NO: 2535 - DNA, 66 bp, Ebola Virus
ttgtgttggtccctgggtcggaagaagttcgttggaactgctctcattttggagggtaatcacaac

SEQ ID NO: 2536 - DNA, 30 bp, Ebola Virus
ttgtgttggtccctgggtcggaagaagttc

SEQ ID NO: 2537 - DNA, 36 bp, Ebola Virus; identical to SEQ ID NO: 1244

SEQ ID NO: 2538 - DNA, 66 bp, Ebola Virus
tgttgtgttggtccctgggtcggaagaagtgttggaactgctctcattttggagggtaatcacaac

SEQ ID NO: 2539 - DNA, 30 bp, Ebola Virus
tgttgtgttggtccctgggtcggaagaagt

SEQ ID NO: 2540 - DNA, 36 bp, Ebola Virus; identical to SEQ ID NO: 1244

SEQ ID NO: 2541 - DNA, 66 bp, Ebola Virus
ttgttgtgttggtccctgggtcggaagaaggttggaactgctctcattttggagggtaatcacaac

SEQ ID NO: 2542 - DNA, 30 bp, Ebola Virus
ttgttgtgttggtccctgggtcggaagaag

SEQ ID NO: 2543 - DNA, 36 bp, Ebola Virus; identical to SEQ ID NO: 1244

SEQ ID NO: 2544 - DNA, 66 bp, Ebola Virus
gttgttgtgttggtccctgggtcggaagaagttggaactgctctcattttggagggtaatcacaac

SEQ ID NO: 2545 - DNA, 30 bp, Ebola Virus
gttgttgtgttggtccctgggtcggaagaa

SEQ ID NO: 2546 - DNA, 36 bp, Ebola Virus; identical to SEQ ID NO: 1244

SEQ ID NO: 2547 - DNA, 66 bp, Ebola Virus
tcagttgttgtgttggtccctgggtcggaagttggaactgctctcattttggagggtaatcacaac

SEQ ID NO: 2548 - DNA, 30 bp, Ebola Virus
tcagttgttgtgttggtccctgggtcggaa

SEQ ID NO: 2549 - DNA, 36 bp, Ebola Virus; identical to SEQ ID NO: 1244

SEQ ID NO: 2550 - DNA, 66 bp, Ebola Virus
ttcagttgttgtgttggtccctgggtcggagttggaactgctctcattttggagggtaatcacaac

SEQ ID NO: 2551 - DNA, 30 bp, Ebola Virus
ttcagttgttgtgttggtccctgggtcgga

SEQ ID NO: 2552 - DNA, 36 bp, Ebola Virus; identical to SEQ ID NO: 1244

SEQ ID NO: 2553 - DNA, 66 bp, Ebola Virus
cttcagttgttgtgttggtccctgggtcgggttggaactgctctcattttggagggtaatcacaac

SEQ ID NO: 2554 - DNA, 30 bp, Ebola Virus
cttcagttgttgtgttggtccctgggtcgg

SEQ ID NO: 2555 - DNA, 36 bp, Ebola Virus; identical to SEQ ID NO: 1244

SEQ ID NO: 2556 - DNA, 66 bp, Ebola Virus
tcttcagttgttgtgttggtccctgggtcggttggaactgctctcattttggagggtaatcacaac

SEQ ID NO: 2557 - DNA, 30 bp, Ebola Virus
tcttcagttgttgtgttggtccctgggtcg

SEQ ID NO: 2558 - DNA, 36 bp, Ebola Virus; identical to SEQ ID NO: 1244

SEQ ID NO: 2559 - DNA, 66 bp, Ebola Virus
gtcttcagttgttgtgttggtccctgggtcgttggaactgctctcattttggagggtaatcacaac

SEQ ID NO: 2560 - DNA, 30 bp, Ebola Virus
gtcttcagttgttgtgttggtccctgggtc

SEQ ID NO: 2561 - DNA, 36 bp, Ebola Virus; identical to SEQ ID NO: 1244

SEQ ID NO: 2562 - DNA, 66 bp, Ebola Virus
ggtcttcagttgttgtgttggtccctgggtgttggaactgctctcattttggagggtaatcacaac

SEQ ID NO: 2563 - DNA, 30 bp, Ebola Virus
ggtcttcagttgttgtgttggtccctgggt

SEQ ID NO: 2564 - DNA, 36 bp, Ebola Virus; identical to SEQ ID NO: 1244

SEQ ID NO: 2565 - DNA, 66 bp, Ebola Virus
tgtggtcttcagttgttgtgttggtccctggttggaactgctctcattttggagggtaatcacaac

SEQ ID NO: 2566 - DNA, 30 bp, Ebola Virus
tgtggtcttcagttgttgtgttggtccctg

SEQ ID NO: 2567 - DNA, 36 bp, Ebola Virus; identical to SEQ ID NO: 1244

SEQ ID NO: 2568 - DNA, 66 bp, Ebola Virus
ttgtggtcttcagttgttgtgttggtccctgttggaactgctctcattttggagggtaatcacaac

SEQ ID NO: 2569 - DNA, 30 bp, Ebola Virus
ttgtggtcttcagttgttgtgttggtccct

SEQ ID NO: 2570 - DNA, 36 bp, Ebola Virus; identical to SEQ ID NO: 1244

SEQ ID NO: 2571 - DNA, 66 bp, Ebola Virus
tttgtggtcttcagttgttgtgttggtcccgttggaactgctctcattttggagggtaatcacaac

SEQ ID NO: 2572 - DNA, 30 bp, Ebola Virus
tttgtggtcttcagttgttgtgttggtccc

SEQ ID NO: 2573 - DNA, 36 bp, Ebola Virus; identical to SEQ ID NO: 1244

SEQ ID NO: 2574 - DNA, 66 bp, Ebola Virus
ttttgtggtcttcagttgttgtgttggtccgttggaactgctctcattttggagggtaatcacaac

SEQ ID NO: 2575 - DNA, 30 bp, Ebola Virus
ttttgtggtcttcagttgttgtgttggtcc

SEQ ID NO: 2576 - DNA, 36 bp, Ebola Virus; identical to SEQ ID NO: 1244

SEQ ID NO: 2577 - DNA, 66 bp, Ebola Virus
gattttgtggtcttcagttgttgtgttggtgttggaactgctctcattttggagggtaatcacaac

SEQ ID NO: 2578 - DNA, 30 bp, Ebola Virus
gattttgtggtcttcagttgttgtgttggt

SEQ ID NO: 2579 - DNA, 36 bp, Ebola Virus; identical to SEQ ID NO: 1244

SEQ ID NO: 2580 - DNA, 66 bp, Ebola Virus
tgattttgtggtcttcagttgttgtgttgggttggaactgctctcattttggagggtaatcacaac

SEQ ID NO: 2581 - DNA, 30 bp, Ebola Virus
tgattttgtggtcttcagttgttgtgttgg

SEQ ID NO: 2582 - DNA, 36 bp, Ebola Virus; identical to SEQ ID NO: 1244

SEQ ID NO: 2583 - DNA, 66 bp, Ebola Virus
atgattttgtggtcttcagttgttgtgttggttggaactgctctcattttggagggtaatcacaac

SEQ ID NO: 2584 - DNA, 30 bp, Ebola Virus
atgattttgtggtcttcagttgttgtgttg

SEQ ID NO: 2585 - DNA, 36 bp, Ebola Virus; identical to SEQ ID NO: 1244

SEQ ID NO: 2586 - DNA, 66 bp, Ebola Virus
ccatgattttgtggtcttcagttgttgtgtgttggaactgctctcattttggagggtaatcacaac

SEQ ID NO: 2587 - DNA, 30 bp, Ebola Virus
ccatgattttgtggtcttcagttgttgtgt

SEQ ID NO: 2588 - DNA, 36 bp, Ebola Virus; identical to SEQ ID NO: 1244

SEQ ID NO: 2589 - DNA, 66 bp, Ebola Virus
agccatgattttgtggtcttcagttgttgtgttggaactgctctcattttggagggtaatcacaac

SEQ ID NO: 2590 - DNA, 30 bp, Ebola Virus
agccatgattttgtggtcttcagttgttgt

SEQ ID NO: 2591 - DNA, 36 bp, Ebola Virus; identical to SEQ ID NO: 1244

SEQ ID NO: 2592 - DNA, 66 bp, Ebola Virus
aagccatgattttgtggtcttcagttgttggttggaactgctctcattttggagggtaatcacaac

SEQ ID NO: 2593 - DNA, 30 bp, Ebola Virus
aagccatgattttgtggtcttcagttgttg

SEQ ID NO: 2594 - DNA, 36 bp, Ebola Virus; identical to SEQ ID NO: 1244

SEQ ID NO: 2595 - DNA, 66 bp, Ebola Virus
gaagccatgattttgtggtcttcagttgttgttggaactgctctcattttggagggtaatcacaac

SEQ ID NO: 2596 - DNA, 30 bp, Ebola Virus
gaagccatgattttgtggtcttcagttgtt

SEQ ID NO: 2597 - DNA, 36 bp, Ebola Virus; identical to SEQ ID NO: 1244

SEQ ID NO: 2598 - DNA, 66 bp, Ebola Virus
tgaagccatgattttgtggtcttcagttgtgttggaactgctctcattttggagggtaatcacaac

SEQ ID NO: 2599 - DNA, 30 bp, Ebola Virus
tgaagccatgattttgtggtcttcagttgt

SEQ ID NO: 2600 - DNA, 36 bp, Ebola Virus; identical to SEQ ID NO: 1244

SEQ ID NO: 2601 - DNA, 66 bp, Ebola Virus
ttctgaagccatgattttgtggtcttcagtgttggaactgctctcattttggagggtaatcacaac

SEQ ID NO: 2602 - DNA, 30 bp, Ebola Virus
ttctgaagccatgattttgtggtcttcagt

SEQ ID NO: 2603 - DNA, 36 bp, Ebola Virus; identical to SEQ ID NO: 1244

SEQ ID NO: 2604 - DNA, 66 bp, Ebola Virus
tttctgaagccatgattttgtggtcttcaggttggaactgctctcattttggagggtaatcacaac

SEQ ID NO: 2605 - DNA, 30 bp, Ebola Virus
tttctgaagccatgattttgtggtcttcag

SEQ ID NO: 2606 - DNA, 36 bp, Ebola Virus; identical to SEQ ID NO: 1244

SEQ ID NO: 2607 - DNA, 66 bp, Ebola Virus
attttctgaagccatgattttgtggtcttcgttggaactgctctcattttggagggtaatcacaac

SEQ ID NO: 2608 - DNA, 30 bp, Ebola Virus
attttctgaagccatgattttgtggtcttc

SEQ ID NO: 2609 - DNA, 36 bp, Ebola Virus; identical to SEQ ID NO: 1244

SEQ ID NO: 2610 - DNA, 66 bp, Ebola Virus
aattttctgaagccatgattttgtggtcttgttggaactgctctcattttggagggtaatcacaac

SEQ ID NO: 2611 - DNA, 30 bp, Ebola Virus
aattttctgaagccatgattttgtggtctt

SEQ ID NO: 2612 - DNA, 36 bp, Ebola Virus; identical to SEQ ID NO: 1244

SEQ ID NO: 2613 - DNA, 66 bp, Ebola Virus
gaattttctgaagccatgattttgtggtctgttggaactgctctcattttggagggtaatcacaac

SEQ ID NO: 2614 - DNA, 30 bp, Ebola Virus
gaattttctgaagccatgattttgtggtct

SEQ ID NO: 2615 - DNA, 36 bp, Ebola Virus; identical to SEQ ID NO: 1244

SEQ ID NO: 2616 - DNA, 66 bp, Ebola Virus
aggaattttctgaagccatgattttgtggtgttggaactgctctcattttggagggtaatcacaac

SEQ ID NO: 2617 - DNA, 30 bp, Ebola Virus
aggaattttctgaagccatgattttgtggt

SEQ ID NO: 2618 - DNA, 36 bp, Ebola Virus; identical to SEQ ID NO: 1244

SEQ ID NO: 2619 - DNA, 66 bp, Ebola Virus
agaggaattttctgaagccatgattttgtggttggaactgctctcattttggagggtaatcacaac

SEQ ID NO: 2620 - DNA, 30 bp, Ebola Virus
agaggaattttctgaagccatgattttgtg

SEQ ID NO: 2621 - DNA, 36 bp, Ebola Virus; identical to SEQ ID NO: 1244

SEQ ID NO: 2622 - DNA, 66 bp, Ebola Virus
cagaggaattttctgaagccatgattttgtgttggaactgctctcattttggagggtaatcacaac

SEQ ID NO: 2623 - DNA, 30 bp, Ebola Virus
cagaggaattttctgaagccatgattttgt

SEQ ID NO: 2624 - DNA, 36 bp, Ebola Virus; identical to SEQ ID NO: 1244

SEQ ID NO: 2625 - DNA, 66 bp, Ebola Virus
gcagaggaattttctgaagccatgattttggttggaactgctctcattttggagggtaatcacaac

SEQ ID NO: 2626 - DNA, 30 bp, Ebola Virus
gcagaggaattttctgaagccatgattttg

SEQ ID NO: 2627 - DNA, 36 bp, Ebola Virus; identical to SEQ ID NO: 1244

SEQ ID NO: 2628 - DNA, 66 bp, Ebola Virus
tgcagaggaattttctgaagccatgattttgttggaactgctctcattttggagggtaatcacaac

SEQ ID NO: 2629 - DNA, 30 bp, Ebola Virus
tgcagaggaattttctgaagccatgatttt

SEQ ID NO: 2630 - DNA, 36 bp, Ebola Virus; identical to SEQ ID NO: 1244

SEQ ID NO: 2631 - DNA, 66 bp, Ebola Virus
cattgcagaggaattttctgaagccatgatgttggaactgctctcattttggagggtaatcacaac

SEQ ID NO: 2632 - DNA, 30 bp, Ebola Virus
cattgcagaggaattttctgaagccatgat

SEQ ID NO: 2633 - DNA, 36 bp, Ebola Virus; identical to SEQ ID NO: 1244

SEQ ID NO: 2634 - DNA, 66 bp, Ebola Virus
ccattgcagaggaattttctgaagccatgagttggaactgctctcattttggagggtaatcacaac

SEQ ID NO: 2635 - DNA, 30 bp, Ebola Virus
ccattgcagaggaattttctgaagccatga

SEQ ID NO: 2636 - DNA, 36 bp, Ebola Virus; identical to SEQ ID NO: 1244

SEQ ID NO: 2637 - DNA, 66 bp, Ebola Virus
accattgcagaggaattttctgaagccatggttggaactgctctcattttggagggtaatcacaac

SEQ ID NO: 2638 - DNA, 30 bp, Ebola Virus
accattgcagaggaattttctgaagccatg

SEQ ID NO: 2639 - DNA, 36 bp, Ebola Virus; identical to SEQ ID NO: 1244

SEQ ID NO: 2640 - DNA, 66 bp, Ebola Virus
aaccattgcagaggaattttctgaagccatgttggaactgctctcattttggagggtaatcacaac

SEQ ID NO: 2641 - DNA, 30 bp, Ebola Virus
aaccattgcagaggaattttctgaagccat

SEQ ID NO: 2642 - DNA, 36 bp, Ebola Virus; identical to SEQ ID NO: 1244

SEQ ID NO: 2643 - DNA, 66 bp, Ebola Virus
ttgaaccattgcagaggaattttctgaagcgttggaactgctctcattttggagggtaatcacaac

SEQ ID NO: 2644 - DNA, 30 bp, Ebola Virus
ttgaaccattgcagaggaattttctgaagc

SEQ ID NO: 2645 - DNA, 36 bp, Ebola Virus; identical to SEQ ID NO: 1244

SEQ ID NO: 2646 - DNA, 66 bp, Ebola Virus
acttgaaccattgcagaggaattttctgaagttggaactgctctcattttggagggtaatcacaac

SEQ ID NO: 2647 - DNA, 30 bp, Ebola Virus
acttgaaccattgcagaggaattttctgaa

SEQ ID NO: 2648 - DNA, 36 bp, Ebola Virus; identical to SEQ ID NO: 1244

SEQ ID NO: 2649 - DNA, 66 bp, Ebola Virus
cacttgaaccattgcagaggaattttctgagttggaactgctctcattttggagggtaatcacaac

SEQ ID NO: 2650 - DNA, 30 bp, Ebola Virus
cacttgaaccattgcagaggaattttctga

SEQ ID NO: 2651 - DNA, 36 bp, Ebola Virus; identical to SEQ ID NO: 1244

SEQ ID NO: 2652 - DNA, 66 bp, Ebola Virus
tgcacttgaaccattgcagaggaattttctgttggaactgctctcattttggagggtaatcacaac

SEQ ID NO: 2653 - DNA, 30 bp, Ebola Virus
tgcacttgaaccattgcagaggaattttct

SEQ ID NO: 2654 - DNA, 36 bp, Ebola Virus; identical to SEQ ID NO: 1244

SEQ ID NO: 2655 - DNA, 66 bp, Ebola Virus
gtgcacttgaaccattgcagaggaattttcgttggaactgctctcattttggagggtaatcacaac

SEQ ID NO: 2656 - DNA, 30 bp, Ebola Virus
gtgcacttgaaccattgcagaggaattttc

SEQ ID NO: 2657 - DNA, 36 bp, Ebola Virus; identical to SEQ ID NO: 1244

SEQ ID NO: 2658 - DNA, 66 bp, Ebola Virus
ctgtgcacttgaaccattgcagaggaatttgttggaactgctctcattttggagggtaatcacaac

SEQ ID NO: 2659 - DNA, 30 bp, Ebola Virus
ctgtgcacttgaaccattgcagaggaattt

SEQ ID NO: 2660 - DNA, 36 bp, Ebola Virus; identical to SEQ ID NO: 1244

SEQ ID NO: 2661 - DNA, 66 bp, Ebola Virus
actgtgcacttgaaccattgcagaggaattgttggaactgctctcattttggagggtaatcacaac

SEQ ID NO: 2662 - DNA, 30 bp, Ebola Virus
actgtgcacttgaaccattgcagaggaatt

SEQ ID NO: 2663 - DNA, 36 bp, Ebola Virus; identical to SEQ ID NO: 1244

SEQ ID NO: 2664 - DNA, 66 bp, Ebola Virus
tgactgtgcacttgaaccattgcagaggaagttggaactgctctcattttggagggtaatcacaac

SEQ ID NO: 2665 - DNA, 30 bp, Ebola Virus
tgactgtgcacttgaaccattgcagaggaa

SEQ ID NO: 2666 - DNA, 36 bp, Ebola Virus; identical to SEQ ID NO: 1244

SEQ ID NO: 2667 - DNA, 66 bp, Ebola Virus
ttgactgtgcacttgaaccattgcagaggagttggaactgctctcattttggagggtaatcacaac

SEQ ID NO: 2668 - DNA, 30 bp, Ebola Virus
ttgactgtgcacttgaaccattgcagagga

SEQ ID NO: 2669 - DNA, 36 bp, Ebola Virus; identical to SEQ ID NO: 1244

SEQ ID NO: 2670 - DNA, 64 bp, Artificial Sequence
  synthetic
gatttagactaccccaaaaacgaaggggactaaaactatcaaccaataatagtctgaatgtcat

SEQ ID NO: 2671 - DNA, 28 bp, Artificial Sequence
  synthetic
tatcaaccaataatagtctgaatgtcat

SEQ ID NO: 2672 - DNA, 36 bp, Artificial Sequence; identical to SEQ ID NO: 14
  synthetic

SEQ ID NO: 2673 - DNA, 64 bp, Artificial Sequence; identical to SEQ ID NO: 735
  synthetic

SEQ ID NO: 2674 - DNA, 28 bp, Artificial Sequence
  synthetic
atgtcattggttgacctttgtacattaa

SEQ ID NO: 2675 - DNA, 36 bp, Artificial Sequence; identical to SEQ ID NO: 14
  synthetic

SEQ ID NO: 2676 - DNA, 64 bp, Artificial Sequence
  synthetic
gatttagactaccccaaaaacgaaggggactaaaacttaggatgctttgtttcaggtgtatcaa

SEQ ID NO: 2677 - DNA, 28 bp, Artificial Sequence
  synthetic
ttaggatgctttgtttcaggtgtatcaa

SEQ ID NO: 2678 - DNA, 36 bp, Artificial Sequence; identical to SEQ ID NO: 14
  synthetic

SEQ ID NO: 2679 - DNA, 64 bp, Artificial Sequence
  synthetic
gatttagactaccccaaaaacgaaggggactaaaactttctctacaccttttttaggatgcttt

SEQ ID NO: 2680 - DNA, 28 bp, Artificial Sequence
  synthetic
tttctctacaccttttttaggatgcttt

SEQ ID NO: 2681 - DNA, 36 bp, Artificial Sequence; identical to SEQ ID NO: 14
  synthetic

SEQ ID NO: 2682 - DNA, 64 bp, Artificial Sequence
  synthetic
gatttagactaccccaaaaacgaaggggactaaaactgtcattggttgacctttgtacattaat

SEQ ID NO: 2683 - DNA, 28 bp, Artificial Sequence
  synthetic
tgtcattggttgacctttgtacattaat

SEQ ID NO: 2684 - DNA, 36 bp, Artificial Sequence; identical to SEQ ID NO: 14
  synthetic

SEQ ID NO: 2685 - DNA, 64 bp, Artificial Sequence
  synthetic
gatttagactaccccaaaaacgaaggggactaaaacatagtctgaatgtcattggttgaccttt

SEQ ID NO: 2686 - DNA, 28 bp, Artificial Sequence
  synthetic
atagtctgaatgtcattggttgaccttt

SEQ ID NO: 2687 - DNA, 36 bp, Artificial Sequence; identical to SEQ ID NO: 14
  synthetic

SEQ ID NO: 2688 - DNA, 64 bp, Artificial Sequence
  synthetic
gatttagactaccccaaaaacgaaggggactaaaacagtctgaatgtcattggttgacctttgt

SEQ ID NO: 2689 - DNA, 28 bp, Artificial Sequence
  synthetic
agtctgaatgtcattggttgacctttgt

SEQ ID NO: 2690 - DNA, 36 bp, Artificial Sequence; identical to SEQ ID NO: 14
  synthetic

SEQ ID NO: 2691 - DNA, 64 bp, Artificial Sequence; identical to SEQ ID NO: 684
  synthetic

SEQ ID NO: 2692 - DNA, 28 bp, Artificial Sequence
  synthetic
tacattaatttaacagtatcaccatcaa

SEQ ID NO: 2693 - DNA, 36 bp, Artificial Sequence; identical to SEQ ID NO: 14
  synthetic

SEQ ID NO: 2694 - DNA, 64 bp, Artificial Sequence; identical to SEQ ID NO: 792
  synthetic

SEQ ID NO: 2695 - DNA, 28 bp, Artificial Sequence
  synthetic
atgctttgtttcaggtgtatcaaccaat

SEQ ID NO: 2696 - DNA, 36 bp, Artificial Sequence; identical to SEQ ID NO: 14
  synthetic

SEQ ID NO: 2697 - DNA, 64 bp, Artificial Sequence
  synthetic
gatttagactaccccaaaaacgaaggggactaaaacaggatgctttgtttcaggtgtatcaacc

SEQ ID NO: 2698 - DNA, 28 bp, Artificial Sequence
  synthetic
aggatgctttgtttcaggtgtatcaacc

SEQ ID NO: 2699 - DNA, 36 bp, Artificial Sequence; identical to SEQ ID NO: 14
  synthetic

SEQ ID NO: 2700 - DNA, 64 bp, Artificial Sequence
  synthetic
gatttagactaccccaaaaacgaaggggactaaaaccatatttctctacaccttttttaggatg

SEQ ID NO: 2701 - DNA, 28 bp, Artificial Sequence
  synthetic
catatttctctacaccttttttaggatg

SEQ ID NO: 2702 - DNA, 36 bp, Artificial Sequence; identical to SEQ ID NO: 14
  synthetic

SEQ ID NO: 2703 - DNA, 64 bp, Artificial Sequence
  synthetic
gatttagactaccccaaaaacgaaggggactaaaacaccatatttctctacaccttttttagga

SEQ ID NO: 2704 - DNA, 28 bp, Artificial Sequence
  synthetic
accatatttctctacaccttttttagga

SEQ ID NO: 2705 - DNA, 36 bp, Artificial Sequence; identical to SEQ ID NO: 14
  synthetic

SEQ ID NO: 2706 - DNA, 64 bp, Artificial Sequence; identical to SEQ ID NO: 807
  synthetic

SEQ ID NO: 2707 - DNA, 28 bp, Artificial Sequence
  synthetic
cttttttaggatgctttgtttcaggtgt

SEQ ID NO: 2708 - DNA, 36 bp, Artificial Sequence; identical to SEQ ID NO: 14
  synthetic

SEQ ID NO: 2709 - DNA, 64 bp, Artificial Sequence
  synthetic
gatttagactaccccaaaaacgaaggggactaaaactacaccttttttaggatgctttgtttca

SEQ ID NO: 2710 - DNA, 28 bp, Artificial Sequence
  synthetic
tacaccttttttaggatgctttgtttca

SEQ ID NO: 2711 - DNA, 36 bp, Artificial Sequence; identical to SEQ ID NO: 14
  synthetic

SEQ ID NO: 2712 - DNA, 64 bp, Artificial Sequence; identical to SEQ ID NO: 888
  synthetic

SEQ ID NO: 2713 - DNA, 28 bp, Artificial Sequence
  synthetic
tctttttcgtaaatgcacttgcttcagg

SEQ ID NO: 2714 - DNA, 36 bp, Artificial Sequence; identical to SEQ ID NO: 14
  synthetic

SEQ ID NO: 2715 - DNA, 64 bp, Artificial Sequence; identical to SEQ ID NO: 951
  synthetic

SEQ ID NO: 2716 - DNA, 28 bp, Artificial Sequence
  synthetic
ttttctttgcattttctaccatcttttt

SEQ ID NO: 2717 - DNA, 36 bp, Artificial Sequence; identical to SEQ ID NO: 14
  synthetic

SEQ ID NO: 2718 - DNA, 64 bp, Artificial Sequence
  synthetic
gatttagactaccccaaaaacgaaggggactaaaactgaatgtcattggttgacctttgtacat

SEQ ID NO: 2719 - DNA, 28 bp, Artificial Sequence
  synthetic
tgaatgtcattggttgacctttgtacat

SEQ ID NO: 2720 - DNA, 36 bp, Artificial Sequence; identical to SEQ ID NO: 14
  synthetic

SEQ ID NO: 2721 - DNA, 64 bp, Artificial Sequence
  synthetic
gatttagactaccccaaaaacgaaggggactaaaacttttttaggatgctttgtttcaggtgta

SEQ ID NO: 2722 - DNA, 28 bp, Artificial Sequence
  synthetic
ttttttaggatgctttgtttcaggtgta

SEQ ID NO: 2723 - DNA, 36 bp, Artificial Sequence; identical to SEQ ID NO: 14
  synthetic

SEQ ID NO: 2724 - DNA, 64 bp, Artificial Sequence; identical to SEQ ID NO: 786
  synthetic

SEQ ID NO: 2725 - DNA, 28 bp, Artificial Sequence
  synthetic
tttgtttcaggtgtatcaaccaataata

SEQ ID NO: 2726 - DNA, 36 bp, Artificial Sequence; identical to SEQ ID NO: 14
  synthetic

SEQ ID NO: 2727 - DNA, 64 bp, Artificial Sequence
  synthetic
gatttagactaccccaaaaacgaaggggactaaaacttgcttcaggaccatatttctctacacc

SEQ ID NO: 2728 - DNA, 28 bp, Artificial Sequence
  synthetic
ttgcttcaggaccatatttctctacacc

SEQ ID NO: 2729 - DNA, 36 bp, Artificial Sequence; identical to SEQ ID NO: 14
  synthetic

SEQ ID NO: 2730 - DNA, 64 bp, Artificial Sequence; identical to SEQ ID NO: 777
  synthetic

SEQ ID NO: 2731 - DNA, 28 bp, Artificial Sequence
  synthetic
tcaggtgtatcaaccaataatagtctga

SEQ ID NO: 2732 - DNA, 36 bp, Artificial Sequence; identical to SEQ ID NO: 14
  synthetic

SEQ ID NO: 2733 - DNA, 64 bp, Artificial Sequence
  synthetic
gatttagactaccccaaaaacgaaggggactaaaacacttgcttcaggaccatatttctctaca

SEQ ID NO: 2734 - DNA, 28 bp, Artificial Sequence
  synthetic
acttgcttcaggaccatatttctctaca

SEQ ID NO: 2735 - DNA, 36 bp, Artificial Sequence; identical to SEQ ID NO: 14
  synthetic

SEQ ID NO: 2736 - DNA, 64 bp, Artificial Sequence; identical to SEQ ID NO: 786
  synthetic

SEQ ID NO: 2737 - DNA, 28 bp, Artificial Sequence
  synthetic
tttgtttcaggtgtatcaaccaataata

SEQ ID NO: 2738 - DNA, 36 bp, Artificial Sequence; identical to SEQ ID NO: 14
  synthetic

SEQ ID NO: 2739 - DNA, 64 bp, Artificial Sequence
  synthetic
gatttagactaccccaaaaacgaaggggactaaaactctacaccttttttaggatgctttgttt

SEQ ID NO: 2740 - DNA, 28 bp, Artificial Sequence
  synthetic
tctacaccttttttaggatgctttgttt

SEQ ID NO: 2741 - DNA, 36 bp, Artificial Sequence; identical to SEQ ID NO: 14
  synthetic

SEQ ID NO: 2742 - DNA, 64 bp, Artificial Sequence; identical to SEQ ID NO: 843
  synthetic

SEQ ID NO: 2743 - DNA, 28 bp, Artificial Sequence
  synthetic
cttcaggaccatatttctctacaccttt

SEQ ID NO: 2744 - DNA, 36 bp, Artificial Sequence; identical to SEQ ID NO: 14
  synthetic

SEQ ID NO: 2745 - DNA, 64 bp, Artificial Sequence; identical to SEQ ID NO: 711
  synthetic

SEQ ID NO: 2746 - DNA, 28 bp, Artificial Sequence
  synthetic
tgacctttgtacattaatttaacagtat

SEQ ID NO: 2747 - DNA, 36 bp, Artificial Sequence; identical to SEQ ID NO: 14
  synthetic

SEQ ID NO: 2748 - DNA, 64 bp, Artificial Sequence
  synthetic
gatttagactaccccaaaaacgaaggggactaaaacattggttgacctttgtacattaatttaa

SEQ ID NO: 2749 - DNA, 28 bp, Artificial Sequence
  synthetic
attggttgacctttgtacattaatttaa

SEQ ID NO: 2750 - DNA, 36 bp, Artificial Sequence; identical to SEQ ID NO: 14
  synthetic

SEQ ID NO: 2751 - DNA, 64 bp, Artificial Sequence; identical to SEQ ID NO: 732
  synthetic

SEQ ID NO: 2752 - DNA, 28 bp, Artificial Sequence
  synthetic
gtcattggttgacctttgtacattaatt

SEQ ID NO: 2753 - DNA, 36 bp, Artificial Sequence; identical to SEQ ID NO: 14
  synthetic

SEQ ID NO: 2754 - DNA, 64 bp, Artificial Sequence; identical to SEQ ID NO: 822
  synthetic

SEQ ID NO: 2755 - DNA, 28 bp, Artificial Sequence
  synthetic
ttctctacaccttttttaggatgctttg

SEQ ID NO: 2756 - DNA, 36 bp, Artificial Sequence; identical to SEQ ID NO: 14
  synthetic

SEQ ID NO: 2757 - DNA, 64 bp, Artificial Sequence; identical to SEQ ID NO: 927
  synthetic

SEQ ID NO: 2758 - DNA, 28 bp, Artificial Sequence
  synthetic
gcattttctaccatctttttcgtaaatg

SEQ ID NO: 2759 - DNA, 36 bp, Artificial Sequence; identical to SEQ ID NO: 14
  synthetic

SEQ ID NO: 2760 - DNA, 64 bp, Artificial Sequence
  synthetic
gatttagactaccccaaaaacgaaggggactaaaacgcgccactggccacgtggttgctgttgg

SEQ ID NO: 2761 - DNA, 28 bp, Artificial Sequence
  synthetic
gcgccactggccacgtggttgctgttgg

SEQ ID NO: 2762 - DNA, 36 bp, Artificial Sequence; identical to SEQ ID NO: 14
  synthetic

SEQ ID NO: 2763 - DNA, 64 bp, Artificial Sequence
  synthetic
gatttagactaccccaaaaacgaaggggactaaaactggctgcctccccggcgccactggccac

SEQ ID NO: 2764 - DNA, 28 bp, Artificial Sequence
  synthetic
tggctgcctccccggcgccactggccac

SEQ ID NO: 2765 - DNA, 36 bp, Artificial Sequence; identical to SEQ ID NO: 14
  synthetic

SEQ ID NO: 2766 - DNA, 64 bp, Artificial Sequence
  synthetic
gatttagactaccccaaaaacgaaggggactaaaacctgcctccccggcgccactggccacgtg

SEQ ID NO: 2767 - DNA, 28 bp, Artificial Sequence
  synthetic
ctgcctccccggcgccactggccacgtg

SEQ ID NO: 2768 - DNA, 36 bp, Artificial Sequence; identical to SEQ ID NO: 14
  synthetic

SEQ ID NO: 2769 - DNA, 64 bp, Artificial Sequence
  synthetic
gatttagactaccccaaaaacgaaggggactaaaacggctgcctccccggcgccactggccacg

SEQ ID NO: 2770 - DNA, 28 bp, Artificial Sequence
  synthetic
ggctgcctccccggcgccactggccacg

SEQ ID NO: 2771 - DNA, 36 bp, Artificial Sequence; identical to SEQ ID NO: 14
  synthetic

SEQ ID NO: 2772 - DNA, 64 bp, Artificial Sequence
  synthetic
gatttagactaccccaaaaacgaaggggactaaaacccccggcgccactggccacgtggttgct

SEQ ID NO: 2773 - DNA, 28 bp, Artificial Sequence
  synthetic
ccccggcgccactggccacgtggttgct

SEQ ID NO: 2774 - DNA, 36 bp, Artificial Sequence; identical to SEQ ID NO: 14
  synthetic

SEQ ID NO: 2775 - DNA, 64 bp, Artificial Sequence
  synthetic
gatttagactaccccaaaaacgaaggggactaaaacgctgcctccccggcgccactggccacgt

SEQ ID NO: 2776 - DNA, 28 bp, Artificial Sequence
  synthetic
gctgcctccccggcgccactggccacgt

SEQ ID NO: 2777 - DNA, 36 bp, Artificial Sequence; identical to SEQ ID NO: 14
  synthetic

SEQ ID NO: 2778 - DNA, 64 bp, Artificial Sequence
  synthetic
gatttagactaccccaaaaacgaaggggactaaaaccgccactggccacgtggttgctgttggg

SEQ ID NO: 2779 - DNA, 28 bp, Artificial Sequence
  synthetic
cgccactggccacgtggttgctgttggg

SEQ ID NO: 2780 - DNA, 36 bp, Artificial Sequence; identical to SEQ ID NO: 14
  synthetic

SEQ ID NO: 2781 - DNA, 64 bp, Artificial Sequence
  synthetic
gatttagactaccccaaaaacgaaggggactaaaaccggcgccactggccacgtggttgctgtt

SEQ ID NO: 2782 - DNA, 28 bp, Artificial Sequence
  synthetic
cggcgccactggccacgtggttgctgtt

SEQ ID NO: 2783 - DNA, 36 bp, Artificial Sequence; identical to SEQ ID NO: 14
  synthetic

SEQ ID NO: 2784 - DNA, 64 bp, Artificial Sequence
  synthetic
gatttagactaccccaaaaacgaaggggactaaaacatggctgcctccccggcgccactggcca

SEQ ID NO: 2785 - DNA, 28 bp, Artificial Sequence
  synthetic
atggctgcctccccggcgccactggcca

SEQ ID NO: 2786 - DNA, 36 bp, Artificial Sequence; identical to SEQ ID NO: 14
  synthetic

SEQ ID NO: 2787 - DNA, 64 bp, Artificial Sequence
  synthetic
gatttagactaccccaaaaacgaaggggactaaaaccccggcgccactggccacgtggttgctg

SEQ ID NO: 2788 - DNA, 28 bp, Artificial Sequence
  synthetic
cccggcgccactggccacgtggttgctg

SEQ ID NO: 2789 - DNA, 36 bp, Artificial Sequence; identical to SEQ ID NO: 14
  synthetic

SEQ ID NO: 2790 - DNA, 64 bp, Artificial Sequence
  synthetic
gatttagactaccccaaaaacgaaggggactaaaacaatggctgcctccccggcgccactggcc

SEQ ID NO: 2791 - DNA, 28 bp, Artificial Sequence
  synthetic
aatggctgcctccccggcgccactggcc

SEQ ID NO: 2792 - DNA, 36 bp, Artificial Sequence; identical to SEQ ID NO: 14
  synthetic

SEQ ID NO: 2793 - DNA, 64 bp, Artificial Sequence
  synthetic
gatttagactaccccaaaaacgaaggggactaaaacctccccggcgccactggccacgtggttg

SEQ ID NO: 2794 - DNA, 28 bp, Artificial Sequence
  synthetic
ctccccggcgccactggccacgtggttg

SEQ ID NO: 2795 - DNA, 36 bp, Artificial Sequence; identical to SEQ ID NO: 14
  synthetic

SEQ ID NO: 2796 - DNA, 64 bp, Artificial Sequence
  synthetic
gatttagactaccccaaaaacgaaggggactaaaaccctccccggcgccactggccacgtggtt

SEQ ID NO: 2797 - DNA, 28 bp, Artificial Sequence
  synthetic
cctccccggcgccactggccacgtggtt

SEQ ID NO: 2798 - DNA, 36 bp, Artificial Sequence; identical to SEQ ID NO: 14
  synthetic

SEQ ID NO: 2799 - DNA, 64 bp, Artificial Sequence
  synthetic
gatttagactaccccaaaaacgaaggggactaaaactcaatggctgcctccccggcgccactgg

SEQ ID NO: 2800 - DNA, 28 bp, Artificial Sequence
  synthetic
tcaatggctgcctccccggcgccactgg

SEQ ID NO: 2801 - DNA, 36 bp, Artificial Sequence; identical to SEQ ID NO: 14
  synthetic

SEQ ID NO: 2802 - DNA, 64 bp, Artificial Sequence
  synthetic
gatttagactaccccaaaaacgaaggggactaaaacccggcgccactggccacgtggttgctgt

SEQ ID NO: 2803 - DNA, 28 bp, Artificial Sequence
  synthetic
ccggcgccactggccacgtggttgctgt

SEQ ID NO: 2804 - DNA, 36 bp, Artificial Sequence; identical to SEQ ID NO: 14
  synthetic

SEQ ID NO: 2805 - DNA, 64 bp, Artificial Sequence
  synthetic
gatttagactaccccaaaaacgaaggggactaaaaccaatggctgcctccccggcgccactggc

SEQ ID NO: 2806 - DNA, 28 bp, Artificial Sequence
  synthetic
caatggctgcctccccggcgccactggc

SEQ ID NO: 2807 - DNA, 36 bp, Artificial Sequence; identical to SEQ ID NO: 14
  synthetic

SEQ ID NO: 2808 - DNA, 64 bp, Artificial Sequence
  synthetic
gatttagactaccccaaaaacgaaggggactaaaactgcctccccggcgccactggccacgtgg

SEQ ID NO: 2809 - DNA, 28 bp, Artificial Sequence
  synthetic
tgcctccccggcgccactggccacgtgg

SEQ ID NO: 2810 - DNA, 36 bp, Artificial Sequence; identical to SEQ ID NO: 14
  synthetic

SEQ ID NO: 2811 - DNA, 64 bp, Artificial Sequence
  synthetic
gatttagactaccccaaaaacgaaggggactaaaactccccggcgccactggccacgtggttgc

SEQ ID NO: 2812 - DNA, 28 bp, Artificial Sequence
  synthetic
tccccggcgccactggccacgtggttgc

SEQ ID NO: 2813 - DNA, 36 bp, Artificial Sequence; identical to SEQ ID NO: 14
  synthetic

SEQ ID NO: 2814 - DNA, 64 bp, Artificial Sequence
  synthetic
gatttagactaccccaaaaacgaaggggactaaaacggcgccactggccacgtggttgctgttg

SEQ ID NO: 2815 - DNA, 28 bp, Artificial Sequence
  synthetic
ggcgccactggccacgtggttgctgttg

SEQ ID NO: 2816 - DNA, 36 bp, Artificial Sequence; identical to SEQ ID NO: 14
  synthetic

SEQ ID NO: 2817 - DNA, 64 bp, Artificial Sequence
  synthetic
gatttagactaccccaaaaacgaaggggactaaaacgcctccccggcgccactggccacgtggt

SEQ ID NO: 2818 - DNA, 28 bp, Artificial Sequence
  synthetic
gcctccccggcgccactggccacgtggt

SEQ ID NO: 2819 - DNA, 36 bp, Artificial Sequence; identical to SEQ ID NO: 14
  synthetic

SEQ ID NO: 2820 - DNA, 64 bp, Artificial Sequence
  synthetic
gatttagactaccccaaaaacgaaggggactaaaactctcaatggctttcccctgggtgatgca

SEQ ID NO: 2821 - DNA, 28 bp, Artificial Sequence
  synthetic
tctcaatggctttcccctgggtgatgca

SEQ ID NO: 2822 - DNA, 36 bp, Artificial Sequence; identical to SEQ ID NO: 14
  synthetic

SEQ ID NO: 2823 - DNA, 64 bp, Artificial Sequence
  synthetic
gatttagactaccccaaaaacgaaggggactaaaacatggctttcccctgggtgatgcaagagc

SEQ ID NO: 2824 - DNA, 28 bp, Artificial Sequence
  synthetic
atggctttcccctgggtgatgcaagagc

SEQ ID NO: 2825 - DNA, 36 bp, Artificial Sequence; identical to SEQ ID NO: 14
  synthetic

SEQ ID NO: 2826 - DNA, 64 bp, Artificial Sequence
  synthetic
gatttagactaccccaaaaacgaaggggactaaaacaatggctttcccctgggtgatgcaagag

SEQ ID NO: 2827 - DNA, 28 bp, Artificial Sequence
  synthetic
aatggctttcccctgggtgatgcaagag

SEQ ID NO: 2828 - DNA, 36 bp, Artificial Sequence; identical to SEQ ID NO: 14
  synthetic

SEQ ID NO: 2829 - DNA, 64 bp, Artificial Sequence
  synthetic
gatttagactaccccaaaaacgaaggggactaaaacgggtgatgcaagagctgaggtcctgcag

SEQ ID NO: 2830 - DNA, 28 bp, Artificial Sequence
  synthetic
gggtgatgcaagagctgaggtcctgcag

SEQ ID NO: 2831 - DNA, 36 bp, Artificial Sequence; identical to SEQ ID NO: 14
  synthetic

SEQ ID NO: 2832 - DNA, 64 bp, Artificial Sequence
  synthetic
gatttagactaccccaaaaacgaaggggactaaaactggctttcccctgggtgatgcaagagct

SEQ ID NO: 2833 - DNA, 28 bp, Artificial Sequence
  synthetic
tggctttcccctgggtgatgcaagagct

SEQ ID NO: 2834 - DNA, 36 bp, Artificial Sequence; identical to SEQ ID NO: 14
  synthetic

SEQ ID NO: 2835 - DNA, 64 bp, Artificial Sequence
  synthetic
gatttagactaccccaaaaacgaaggggactaaaacctcaatggctttcccctgggtgatgcaa

SEQ ID NO: 2836 - DNA, 28 bp, Artificial Sequence
  synthetic
ctcaatggctttcccctgggtgatgcaa

SEQ ID NO: 2837 - DNA, 36 bp, Artificial Sequence; identical to SEQ ID NO: 14
  synthetic

SEQ ID NO: 2838 - DNA, 64 bp, Artificial Sequence
  synthetic
gatttagactaccccaaaaacgaaggggactaaaacttcccctgggtgatgcaagagctgaggt

SEQ ID NO: 2839 - DNA, 28 bp, Artificial Sequence
  synthetic
ttcccctgggtgatgcaagagctgaggt

SEQ ID NO: 2840 - DNA, 36 bp, Artificial Sequence; identical to SEQ ID NO: 14
  synthetic

SEQ ID NO: 2841 - DNA, 64 bp, Artificial Sequence
  synthetic
gatttagactaccccaaaaacgaaggggactaaaacgctttcccctgggtgatgcaagagctga

SEQ ID NO: 2842 - DNA, 28 bp, Artificial Sequence
  synthetic
gctttcccctgggtgatgcaagagctga

SEQ ID NO: 2843 - DNA, 36 bp, Artificial Sequence; identical to SEQ ID NO: 14
  synthetic

SEQ ID NO: 2844 - DNA, 64 bp, Artificial Sequence
  synthetic
gatttagactaccccaaaaacgaaggggactaaaactcccctgggtgatgcaagagctgaggtc

SEQ ID NO: 2845 - DNA, 28 bp, Artificial Sequence
  synthetic
tcccctgggtgatgcaagagctgaggtc

SEQ ID NO: 2846 - DNA, 36 bp, Artificial Sequence; identical to SEQ ID NO: 14
  synthetic

SEQ ID NO: 2847 - DNA, 64 bp, Artificial Sequence
  synthetic
gatttagactaccccaaaaacgaaggggactaaaacctttcccctgggtgatgcaagagctgag

SEQ ID NO: 2848 - DNA, 28 bp, Artificial Sequence
  synthetic
ctttcccctgggtgatgcaagagctgag

SEQ ID NO: 2849 - DNA, 36 bp, Artificial Sequence; identical to SEQ ID NO: 14
  synthetic

SEQ ID NO: 2850 - DNA, 64 bp, Artificial Sequence
  synthetic
gatttagactaccccaaaaacgaaggggactaaaaccaatggctttcccctgggtgatgcaaga

SEQ ID NO: 2851 - DNA, 28 bp, Artificial Sequence
  synthetic
caatggctttcccctgggtgatgcaaga

SEQ ID NO: 2852 - DNA, 36 bp, Artificial Sequence; identical to SEQ ID NO: 14
  synthetic

SEQ ID NO: 2853 - DNA, 64 bp, Artificial Sequence
  synthetic
gatttagactaccccaaaaacgaaggggactaaaaccctgggtgatgcaagagctgaggtcctg

SEQ ID NO: 2854 - DNA, 28 bp, Artificial Sequence
  synthetic
cctgggtgatgcaagagctgaggtcctg

SEQ ID NO: 2855 - DNA, 36 bp, Artificial Sequence; identical to SEQ ID NO: 14
  synthetic

SEQ ID NO: 2856 - DNA, 64 bp, Artificial Sequence
  synthetic
gatttagactaccccaaaaacgaaggggactaaaacggtctcaatggctttcccctgggtgatg

SEQ ID NO: 2857 - DNA, 28 bp, Artificial Sequence
  synthetic
ggtctcaatggctttcccctgggtgatg

SEQ ID NO: 2858 - DNA, 36 bp, Artificial Sequence; identical to SEQ ID NO: 14
  synthetic

SEQ ID NO: 2859 - DNA, 64 bp, Artificial Sequence
  synthetic
gatttagactaccccaaaaacgaaggggactaaaacgggtctcaatggctttcccctgggtgat

SEQ ID NO: 2860 - DNA, 28 bp, Artificial Sequence
  synthetic
gggtctcaatggctttcccctgggtgat

SEQ ID NO: 2861 - DNA, 36 bp, Artificial Sequence; identical to SEQ ID NO: 14
  synthetic

SEQ ID NO: 2862 - DNA, 64 bp, Artificial Sequence
  synthetic
gatttagactaccccaaaaacgaaggggactaaaacggctttcccctgggtgatgcaagagctg

SEQ ID NO: 2863 - DNA, 28 bp, Artificial Sequence
  synthetic
ggctttcccctgggtgatgcaagagctg

SEQ ID NO: 2864 - DNA, 36 bp, Artificial Sequence; identical to SEQ ID NO: 14
  synthetic

SEQ ID NO: 2865 - DNA, 64 bp, Artificial Sequence
  synthetic
gatttagactaccccaaaaacgaaggggactaaaactttcccctgggtgatgcaagagctgagg

SEQ ID NO: 2866 - DNA, 28 bp, Artificial Sequence
  synthetic
tttcccctgggtgatgcaagagctgagg

SEQ ID NO: 2867 - DNA, 36 bp, Artificial Sequence; identical to SEQ ID NO: 14
  synthetic

SEQ ID NO: 2868 - DNA, 64 bp, Artificial Sequence
  synthetic
gatttagactaccccaaaaacgaaggggactaaaaccccctgggtgatgcaagagctgaggtcc

SEQ ID NO: 2869 - DNA, 28 bp, Artificial Sequence
  synthetic
cccctgggtgatgcaagagctgaggtcc

SEQ ID NO: 2870 - DNA, 36 bp, Artificial Sequence; identical to SEQ ID NO: 14
  synthetic

SEQ ID NO: 2871 - DNA, 64 bp, Artificial Sequence
  synthetic
gatttagactaccccaaaaacgaaggggactaaaactgggtgatgcaagagctgaggtcctgca

SEQ ID NO: 2872 - DNA, 28 bp, Artificial Sequence
  synthetic
tgggtgatgcaagagctgaggtcctgca

SEQ ID NO: 2873 - DNA, 36 bp, Artificial Sequence; identical to SEQ ID NO: 14
  synthetic

SEQ ID NO: 2874 - DNA, 64 bp, Artificial Sequence
  synthetic
gatttagactaccccaaaaacgaaggggactaaaacgtctcaatggctttcccctgggtgatgc

SEQ ID NO: 2875 - DNA, 28 bp, Artificial Sequence
  synthetic
gtctcaatggctttcccctgggtgatgc

SEQ ID NO: 2876 - DNA, 36 bp, Artificial Sequence; identical to SEQ ID NO: 14
  synthetic

SEQ ID NO: 2877 - DNA, 64 bp, Artificial Sequence
  synthetic
gatttagactaccccaaaaacgaaggggactaaaacctgggtgatgcaagagctgaggtcctgc

SEQ ID NO: 2878 - DNA, 28 bp, Artificial Sequence
  synthetic
ctgggtgatgcaagagctgaggtcctgc

SEQ ID NO: 2879 - DNA, 36 bp, Artificial Sequence; identical to SEQ ID NO: 14
  synthetic

SEQ ID NO: 2880 - DNA, 64 bp, Artificial Sequence
  synthetic
gatttagactaccccaaaaacgaaggggactaaaacccctgggtgatgcaagagctgaggtcct

SEQ ID NO: 2881 - DNA, 28 bp, Artificial Sequence
  synthetic
ccctgggtgatgcaagagctgaggtcct

SEQ ID NO: 2882 - DNA, 36 bp, Artificial Sequence; identical to SEQ ID NO: 14
  synthetic

SEQ ID NO: 2883 - DNA, 64 bp, Artificial Sequence
  synthetic
gatttagactaccccaaaaacgaaggggactaaaactcaatggctttcccctgggtgatgcaag

SEQ ID NO: 2884 - DNA, 28 bp, Artificial Sequence
  synthetic
tcaatggctttcccctgggtgatgcaag

SEQ ID NO: 2885 - DNA, 36 bp, Artificial Sequence; identical to SEQ ID NO: 14
  synthetic

SEQ ID NO: 2886 - DNA, 64 bp, Artificial Sequence
  synthetic
gatttagactaccccaaaaacgaaggggactaaaactgggtctcaatggctttcccctgggtga

SEQ ID NO: 2887 - DNA, 28 bp, Artificial Sequence
  synthetic
tgggtctcaatggctttcccctgggtga

SEQ ID NO: 2888 - DNA, 36 bp, Artificial Sequence; identical to SEQ ID NO: 14
  synthetic

SEQ ID NO: 2889 - DNA, 66 bp, Artificial Sequence
  synthetic
cggcgccactggccacgtggttgctgttgggttggaactgctctcattttggagggtaatcacaac

SEQ ID NO: 2890 - DNA, 30 bp, Artificial Sequence
  synthetic
cggcgccactggccacgtggttgctgttgg

SEQ ID NO: 2891 - DNA, 36 bp, Artificial Sequence; identical to SEQ ID NO: 1244
  synthetic

SEQ ID NO: 2892 - DNA, 66 bp, Artificial Sequence
  synthetic
ccggcgccactggccacgtggttgctgttggttggaactgctctcattttggagggtaatcacaac

SEQ ID NO: 2893 - DNA, 30 bp, Artificial Sequence
  synthetic
ccggcgccactggccacgtggttgctgttg

SEQ ID NO: 2894 - DNA, 36 bp, Artificial Sequence; identical to SEQ ID NO: 1244
  synthetic

SEQ ID NO: 2895 - DNA, 66 bp, Artificial Sequence
  synthetic
cccggcgccactggccacgtggttgctgttgttggaactgctctcattttggagggtaatcacaac

SEQ ID NO: 2896 - DNA, 30 bp, Artificial Sequence
  synthetic
cccggcgccactggccacgtggttgctgtt

SEQ ID NO: 2897 - DNA, 36 bp, Artificial Sequence; identical to SEQ ID NO: 1244
  synthetic

SEQ ID NO: 2898 - DNA, 66 bp, Artificial Sequence
  synthetic
ccccggcgccactggccacgtggttgctgtgttggaactgctctcattttggagggtaatcacaac

SEQ ID NO: 2899 - DNA, 30 bp, Artificial Sequence
  synthetic
ccccggcgccactggccacgtggttgctgt

SEQ ID NO: 2900 - DNA, 36 bp, Artificial Sequence; identical to SEQ ID NO: 1244
  synthetic

SEQ ID NO: 2901 - DNA, 66 bp, Artificial Sequence
  synthetic
tccccggcgccactggccacgtggttgctggttggaactgctctcattttggagggtaatcacaac

SEQ ID NO: 2902 - DNA, 30 bp, Artificial Sequence
  synthetic
tccccggcgccactggccacgtggttgctg

SEQ ID NO: 2903 - DNA, 36 bp, Artificial Sequence; identical to SEQ ID NO: 1244
  synthetic

SEQ ID NO: 2904 - DNA, 66 bp, Artificial Sequence
  synthetic
ctccccggcgccactggccacgtggttgctgttggaactgctctcattttggagggtaatcacaac

SEQ ID NO: 2905 - DNA, 30 bp, Artificial Sequence
  synthetic
ctccccggcgccactggccacgtggttgct

SEQ ID NO: 2906 - DNA, 36 bp, Artificial Sequence; identical to SEQ ID NO: 1244
  synthetic

SEQ ID NO: 2907 - DNA, 66 bp, Artificial Sequence
  synthetic
cctccccggcgccactggccacgtggttgcgttggaactgctctcattttggagggtaatcacaac

SEQ ID NO: 2908 - DNA, 30 bp, Artificial Sequence
  synthetic
cctccccggcgccactggccacgtggttgc

SEQ ID NO: 2909 - DNA, 36 bp, Artificial Sequence; identical to SEQ ID NO: 1244
  synthetic

SEQ ID NO: 2910 - DNA, 66 bp, Artificial Sequence
  synthetic
gcctccccggcgccactggccacgtggttggttggaactgctctcattttggagggtaatcacaac

SEQ ID NO: 2911 - DNA, 30 bp, Artificial Sequence
  synthetic
gcctccccggcgccactggccacgtggttg

SEQ ID NO: 2912 - DNA, 36 bp, Artificial Sequence; identical to SEQ ID NO: 1244
  synthetic

SEQ ID NO: 2913 - DNA, 66 bp, Artificial Sequence
  synthetic
tgcctccccggcgccactggccacgtggttgttggaactgctctcattttggagggtaatcacaac

SEQ ID NO: 2914 - DNA, 30 bp, Artificial Sequence
  synthetic
tgcctccccggcgccactggccacgtggtt

SEQ ID NO: 2915 - DNA, 36 bp, Artificial Sequence; identical to SEQ ID NO: 1244
  synthetic

SEQ ID NO: 2916 - DNA, 66 bp, Artificial Sequence
  synthetic
ctgcctccccggcgccactggccacgtggtgttggaactgctctcattttggagggtaatcacaac

SEQ ID NO: 2917 - DNA, 30 bp, Artificial Sequence
  synthetic
ctgcctccccggcgccactggccacgtggt

SEQ ID NO: 2918 - DNA, 36 bp, Artificial Sequence; identical to SEQ ID NO: 1244
  synthetic

SEQ ID NO: 2919 - DNA, 66 bp, Artificial Sequence
  synthetic
gctgcctccccggcgccactggccacgtgggttggaactgctctcattttggagggtaatcacaac

SEQ ID NO: 2920 - DNA, 30 bp, Artificial Sequence
  synthetic
gctgcctccccggcgccactggccacgtgg

SEQ ID NO: 2921 - DNA, 36 bp, Artificial Sequence; identical to SEQ ID NO: 1244
  synthetic

SEQ ID NO: 2922 - DNA, 66 bp, Artificial Sequence
  synthetic
ggctgcctccccggcgccactggccacgtggttggaactgctctcattttggagggtaatcacaac

SEQ ID NO: 2923 - DNA, 30 bp, Artificial Sequence
  synthetic
ggctgcctccccggcgccactggccacgtg

SEQ ID NO: 2924 - DNA, 36 bp, Artificial Sequence; identical to SEQ ID NO: 1244
  synthetic

SEQ ID NO: 2925 - DNA, 66 bp, Artificial Sequence
  synthetic
tggctgcctccccggcgccactggccacgtgttggaactgctctcattttggagggtaatcacaac

SEQ ID NO: 2926 - DNA, 30 bp, Artificial Sequence
  synthetic
tggctgcctccccggcgccactggccacgt

SEQ ID NO: 2927 - DNA, 36 bp, Artificial Sequence; identical to SEQ ID NO: 1244
  synthetic

SEQ ID NO: 2928 - DNA, 66 bp, Artificial Sequence
  synthetic
atggctgcctccccggcgccactggccacggttggaactgctctcattttggagggtaatcacaac

SEQ ID NO: 2929 - DNA, 30 bp, Artificial Sequence
  synthetic
atggctgcctccccggcgccactggccacg

SEQ ID NO: 2930 - DNA, 36 bp, Artificial Sequence; identical to SEQ ID NO: 1244
  synthetic

SEQ ID NO: 2931 - DNA, 66 bp, Artificial Sequence
  synthetic
aatggctgcctccccggcgccactggccacgttggaactgctctcattttggagggtaatcacaac

SEQ ID NO: 2932 - DNA, 30 bp, Artificial Sequence
  synthetic
aatggctgcctccccggcgccactggccac

SEQ ID NO: 2933 - DNA, 36 bp, Artificial Sequence; identical to SEQ ID NO: 1244
  synthetic

SEQ ID NO: 2934 - DNA, 66 bp, Artificial Sequence
  synthetic
caatggctgcctccccggcgccactggccagttggaactgctctcattttggagggtaatcacaac

SEQ ID NO: 2935 - DNA, 30 bp, Artificial Sequence
  synthetic
caatggctgcctccccggcgccactggcca

SEQ ID NO: 2936 - DNA, 36 bp, Artificial Sequence; identical to SEQ ID NO: 1244
  synthetic

SEQ ID NO: 2937 - DNA, 66 bp, Artificial Sequence
  synthetic
ctgggtgatgcaagagctgaggtcctgcaggttggaactgctctcattttggagggtaatcacaac

SEQ ID NO: 2938 - DNA, 30 bp, Artificial Sequence
  synthetic
ctgggtgatgcaagagctgaggtcctgcag

SEQ ID NO: 2939 - DNA, 36 bp, Artificial Sequence; identical to SEQ ID NO: 1244
  synthetic

SEQ ID NO: 2940 - DNA, 66 bp, Artificial Sequence
  synthetic
cctgggtgatgcaagagctgaggtcctgcagttggaactgctctcattttggagggtaatcacaac

SEQ ID NO: 2941 - DNA, 30 bp, Artificial Sequence
  synthetic
cctgggtgatgcaagagctgaggtcctgca

SEQ ID NO: 2942 - DNA, 36 bp, Artificial Sequence; identical to SEQ ID NO: 1244
  synthetic

SEQ ID NO: 2943 - DNA, 66 bp, Artificial Sequence
  synthetic
ccctgggtgatgcaagagctgaggtcctgcgttggaactgctctcattttggagggtaatcacaac

SEQ ID NO: 2944 - DNA, 30 bp, Artificial Sequence
  synthetic
ccctgggtgatgcaagagctgaggtcctgc

SEQ ID NO: 2945 - DNA, 36 bp, Artificial Sequence; identical to SEQ ID NO: 1244
  synthetic

SEQ ID NO: 2946 - DNA, 66 bp, Artificial Sequence
  synthetic
cccctgggtgatgcaagagctgaggtcctggttggaactgctctcattttggagggtaatcacaac

SEQ ID NO: 2947 - DNA, 30 bp, Artificial Sequence
  synthetic
cccctgggtgatgcaagagctgaggtcctg

SEQ ID NO: 2948 - DNA, 36 bp, Artificial Sequence; identical to SEQ ID NO: 1244
  synthetic

SEQ ID NO: 2949 - DNA, 66 bp, Artificial Sequence
  synthetic
tcccctgggtgatgcaagagctgaggtcctgttggaactgctctcattttggagggtaatcacaac

SEQ ID NO: 2950 - DNA, 30 bp, Artificial Sequence
  synthetic
tcccctgggtgatgcaagagctgaggtcct

SEQ ID NO: 2951 - DNA, 36 bp, Artificial Sequence; identical to SEQ ID NO: 1244
  synthetic

SEQ ID NO: 2952 - DNA, 66 bp, Artificial Sequence
  synthetic
ttcccctgggtgatgcaagagctgaggtccgttggaactgctctcattttggagggtaatcacaac

SEQ ID NO: 2953 - DNA, 30 bp, Artificial Sequence
  synthetic
ttcccctgggtgatgcaagagctgaggtcc

SEQ ID NO: 2954 - DNA, 36 bp, Artificial Sequence; identical to SEQ ID NO: 1244
  synthetic

SEQ ID NO: 2955 - DNA, 66 bp, Artificial Sequence
  synthetic
tttcccctgggtgatgcaagagctgaggtcgttggaactgctctcattttggagggtaatcacaac

SEQ ID NO: 2956 - DNA, 30 bp, Artificial Sequence
  synthetic
tttcccctgggtgatgcaagagctgaggtc

SEQ ID NO: 2957 - DNA, 36 bp, Artificial Sequence; identical to SEQ ID NO: 1244
  synthetic

SEQ ID NO: 2958 - DNA, 66 bp, Artificial Sequence
  synthetic
ctttcccctgggtgatgcaagagctgaggtgttggaactgctctcattttggagggtaatcacaac

SEQ ID NO: 2959 - DNA, 30 bp, Artificial Sequence
  synthetic
ctttcccctgggtgatgcaagagctgaggt

SEQ ID NO: 2960 - DNA, 36 bp, Artificial Sequence; identical to SEQ ID NO: 1244
  synthetic

SEQ ID NO: 2961 - DNA, 66 bp, Artificial Sequence
  synthetic
gctttcccctgggtgatgcaagagctgagggttggaactgctctcattttggagggtaatcacaac

SEQ ID NO: 2962 - DNA, 30 bp, Artificial Sequence
  synthetic
gctttcccctgggtgatgcaagagctgagg

SEQ ID NO: 2963 - DNA, 36 bp, Artificial Sequence; identical to SEQ ID NO: 1244
  synthetic

SEQ ID NO: 2964 - DNA, 66 bp, Artificial Sequence
  synthetic
ggctttcccctgggtgatgcaagagctgaggttggaactgctctcattttggagggtaatcacaac

SEQ ID NO: 2965 - DNA, 30 bp, Artificial Sequence
  synthetic
ggctttcccctgggtgatgcaagagctgag

SEQ ID NO: 2966 - DNA, 36 bp, Artificial Sequence; identical to SEQ ID NO: 1244
  synthetic

SEQ ID NO: 2967 - DNA, 66 bp, Artificial Sequence
  synthetic
tggctttcccctgggtgatgcaagagctgagttggaactgctctcattttggagggtaatcacaac

SEQ ID NO: 2968 - DNA, 30 bp, Artificial Sequence
  synthetic
tggctttcccctgggtgatgcaagagctga

SEQ ID NO: 2969 - DNA, 36 bp, Artificial Sequence; identical to SEQ ID NO: 1244
  synthetic

SEQ ID NO: 2970 - DNA, 66 bp, Artificial Sequence
  synthetic
atggctttcccctgggtgatgcaagagctggttggaactgctctcattttggagggtaatcacaac

SEQ ID NO: 2971 - DNA, 30 bp, Artificial Sequence
  synthetic
atggctttcccctgggtgatgcaagagctg

SEQ ID NO: 2972 - DNA, 36 bp, Artificial Sequence; identical to SEQ ID NO: 1244
  synthetic

SEQ ID NO: 2973 - DNA, 66 bp, Artificial Sequence
  synthetic
aatggctttcccctgggtgatgcaagagctgttggaactgctctcattttggagggtaatcacaac

SEQ ID NO: 2974 - DNA, 30 bp, Artificial Sequence
  synthetic
aatggctttcccctgggtgatgcaagagct

SEQ ID NO: 2975 - DNA, 36 bp, Artificial Sequence; identical to SEQ ID NO: 1244
  synthetic

SEQ ID NO: 2976 - DNA, 66 bp, Artificial Sequence
  synthetic
caatggctttcccctgggtgatgcaagagcgttggaactgctctcattttggagggtaatcacaac

SEQ ID NO: 2977 - DNA, 30 bp, Artificial Sequence
  synthetic
caatggctttcccctgggtgatgcaagagc

SEQ ID NO: 2978 - DNA, 36 bp, Artificial Sequence; identical to SEQ ID NO: 1244
  synthetic

SEQ ID NO: 2979 - DNA, 66 bp, Artificial Sequence
  synthetic
tcaatggctttcccctgggtgatgcaagaggttggaactgctctcattttggagggtaatcacaac

SEQ ID NO: 2980 - DNA, 30 bp, Artificial Sequence
  synthetic
tcaatggctttcccctgggtgatgcaagag

SEQ ID NO: 2981 - DNA, 36 bp, Artificial Sequence; identical to SEQ ID NO: 1244
  synthetic

SEQ ID NO: 2982 - DNA, 66 bp, Artificial Sequence
  synthetic
ctcaatggctttcccctgggtgatgcaagagttggaactgctctcattttggagggtaatcacaac

SEQ ID NO: 2983 - DNA, 30 bp, Artificial Sequence
  synthetic
ctcaatggctttcccctgggtgatgcaaga

SEQ ID NO: 2984 - DNA, 36 bp, Artificial Sequence; identical to SEQ ID NO: 1244
  synthetic

SEQ ID NO: 2985 - DNA, 66 bp, Artificial Sequence
  synthetic
tctcaatggctttcccctgggtgatgcaaggttggaactgctctcattttggagggtaatcacaac

SEQ ID NO: 2986 - DNA, 30 bp, Artificial Sequence
  synthetic
tctcaatggctttcccctgggtgatgcaag

SEQ ID NO: 2987 - DNA, 36 bp, Artificial Sequence; identical to SEQ ID NO: 1244
  synthetic

SEQ ID NO: 2988 - DNA, 66 bp, Artificial Sequence
  synthetic
gtctcaatggctttcccctgggtgatgcaagttggaactgctctcattttggagggtaatcacaac

SEQ ID NO: 2989 - DNA, 30 bp, Artificial Sequence
  synthetic
gtctcaatggctttcccctgggtgatgcaa

SEQ ID NO: 2990 - DNA, 36 bp, Artificial Sequence; identical to SEQ ID NO: 1244
  synthetic

SEQ ID NO: 2991 - DNA, 66 bp, Artificial Sequence
  synthetic
ggtctcaatggctttcccctgggtgatgcagttggaactgctctcattttggagggtaatcacaac

SEQ ID NO: 2992 - DNA, 30 bp, Artificial Sequence
  synthetic
ggtctcaatggctttcccctgggtgatgca

SEQ ID NO: 2993 - DNA, 36 bp, Artificial Sequence; identical to SEQ ID NO: 1244
  synthetic

SEQ ID NO: 2994 - DNA, 66 bp, Artificial Sequence
  synthetic
gggtctcaatggctttcccctgggtgatgcgttggaactgctctcattttggagggtaatcacaac

SEQ ID NO: 2995 - DNA, 30 bp, Artificial Sequence
  synthetic
gggtctcaatggctttcccctgggtgatgc

SEQ ID NO: 2996 - DNA, 36 bp, Artificial Sequence; identical to SEQ ID NO: 1244
  synthetic

SEQ ID NO: 2997 - DNA, 66 bp, Artificial Sequence
  synthetic
tgggtctcaatggctttcccctgggtgatggttggaactgctctcattttggagggtaatcacaac

SEQ ID NO: 2998 - DNA, 30 bp, Artificial Sequence
  synthetic
tgggtctcaatggctttcccctgggtgatg

SEQ ID NO: 2999 - DNA, 36 bp, Artificial Sequence; identical to SEQ ID NO: 1244
  synthetic

SEQ ID NO: 3000 - DNA, 66 bp, Artificial Sequence
  synthetic
ctgggtctcaatggctttcccctgggtgatgttggaactgctctcattttggagggtaatcacaac

SEQ ID NO: 3001 - DNA, 30 bp, Artificial Sequence
  synthetic
ctgggtctcaatggctttcccctgggtgat

SEQ ID NO: 3002 - DNA, 36 bp, Artificial Sequence; identical to SEQ ID NO: 1244
  synthetic

SEQ ID NO: 3003 - DNA, 66 bp, Artificial Sequence
  synthetic
tcattggttgacctttgtacattaatttaagttggaactgctctcattttggagggtaatcacaac

SEQ ID NO: 3004 - DNA, 30 bp, Artificial Sequence
  synthetic
tcattggttgacctttgtacattaatttaa

SEQ ID NO: 3005 - DNA, 36 bp, Artificial Sequence; identical to SEQ ID NO: 1244
  synthetic

SEQ ID NO: 3006 - DNA, 66 bp, Artificial Sequence
  synthetic
tgtcattggttgacctttgtacattaatttgttggaactgctctcattttggagggtaatcacaac

SEQ ID NO: 3007 - DNA, 30 bp, Artificial Sequence
  synthetic
tgtcattggttgacctttgtacattaattt

SEQ ID NO: 3008 - DNA, 36 bp, Artificial Sequence; identical to SEQ ID NO: 1244
  synthetic

SEQ ID NO: 3009 - DNA, 66 bp, Artificial Sequence
  synthetic
aatgtcattggttgacctttgtacattaatgttggaactgctctcattttggagggtaatcacaac

SEQ ID NO: 3010 - DNA, 30 bp, Artificial Sequence
  synthetic
aatgtcattggttgacctttgtacattaat

SEQ ID NO: 3011 - DNA, 36 bp, Artificial Sequence; identical to SEQ ID NO: 1244
  synthetic

SEQ ID NO: 3012 - DNA, 66 bp, Artificial Sequence
  synthetic
tgaatgtcattggttgacctttgtacattagttggaactgctctcattttggagggtaatcacaac

SEQ ID NO: 3013 - DNA, 30 bp, Artificial Sequence
  synthetic
tgaatgtcattggttgacctttgtacatta

SEQ ID NO: 3014 - DNA, 36 bp, Artificial Sequence; identical to SEQ ID NO: 1244
  synthetic

SEQ ID NO: 3015 - DNA, 66 bp, Artificial Sequence
  synthetic
tctgaatgtcattggttgacctttgtacatgttggaactgctctcattttggagggtaatcacaac

SEQ ID NO: 3016 - DNA, 30 bp, Artificial Sequence
  synthetic
tctgaatgtcattggttgacctttgtacat

SEQ ID NO: 3017 - DNA, 36 bp, Artificial Sequence; identical to SEQ ID NO: 1244
  synthetic

SEQ ID NO: 3018 - DNA, 66 bp, Artificial Sequence
  synthetic
agtctgaatgtcattggttgacctttgtacgttggaactgctctcattttggagggtaatcacaac

SEQ ID NO: 3019 - DNA, 30 bp, Artificial Sequence
  synthetic
agtctgaatgtcattggttgacctttgtac

SEQ ID NO: 3020 - DNA, 36 bp, Artificial Sequence; identical to SEQ ID NO: 1244
  synthetic

SEQ ID NO: 3021 - DNA, 66 bp, Artificial Sequence
  synthetic
atagtctgaatgtcattggttgacctttgtgttggaactgctctcattttggagggtaatcacaac

SEQ ID NO: 3022 - DNA, 30 bp, Artificial Sequence
  synthetic
atagtctgaatgtcattggttgacctttgt

SEQ ID NO: 3023 - DNA, 36 bp, Artificial Sequence; identical to SEQ ID NO: 1244
  synthetic

SEQ ID NO: 3024 - DNA, 66 bp, Artificial Sequence
  synthetic
taatagtctgaatgtcattggttgacctttgttggaactgctctcattttggagggtaatcacaac

SEQ ID NO: 3025 - DNA, 30 bp, Artificial Sequence
  synthetic
taatagtctgaatgtcattggttgaccttt

SEQ ID NO: 3026 - DNA, 36 bp, Artificial Sequence; identical to SEQ ID NO: 1244
  synthetic

SEQ ID NO: 3027 - DNA, 66 bp, Artificial Sequence
  synthetic
aataatagtctgaatgtcattggttgacctgttggaactgctctcattttggagggtaatcacaac

SEQ ID NO: 3028 - DNA, 30 bp, Artificial Sequence
  synthetic
aataatagtctgaatgtcattggttgacct

SEQ ID NO: 3029 - DNA, 36 bp, Artificial Sequence; identical to SEQ ID NO: 1244
  synthetic

SEQ ID NO: 3030 - DNA, 66 bp, Artificial Sequence
  synthetic
ccaataatagtctgaatgtcattggttgacgttggaactgctctcattttggagggtaatcacaac

SEQ ID NO: 3031 - DNA, 30 bp, Artificial Sequence
  synthetic
ccaataatagtctgaatgtcattggttgac

SEQ ID NO: 3032 - DNA, 36 bp, Artificial Sequence; identical to SEQ ID NO: 1244
  synthetic

SEQ ID NO: 3033 - DNA, 66 bp, Artificial Sequence
  synthetic
aaccaataatagtctgaatgtcattggttggttggaactgctctcattttggagggtaatcacaac

SEQ ID NO: 3034 - DNA, 30 bp, Artificial Sequence
  synthetic
aaccaataatagtctgaatgtcattggttg

SEQ ID NO: 3035 - DNA, 36 bp, Artificial Sequence; identical to SEQ ID NO: 1244
  synthetic

SEQ ID NO: 3036 - DNA, 66 bp, Artificial Sequence
  synthetic
tcaaccaataatagtctgaatgtcattggtgttggaactgctctcattttggagggtaatcacaac

SEQ ID NO: 3037 - DNA, 30 bp, Artificial Sequence
  synthetic
tcaaccaataatagtctgaatgtcattggt

SEQ ID NO: 3038 - DNA, 36 bp, Artificial Sequence; identical to SEQ ID NO: 1244
  synthetic

SEQ ID NO: 3039 - DNA, 66 bp, Artificial Sequence
  synthetic
tatcaaccaataatagtctgaatgtcattggttggaactgctctcattttggagggtaatcacaac

SEQ ID NO: 3040 - DNA, 30 bp, Artificial Sequence
  synthetic
tatcaaccaataatagtctgaatgtcattg

SEQ ID NO: 3041 - DNA, 36 bp, Artificial Sequence; identical to SEQ ID NO: 1244
  synthetic

SEQ ID NO: 3042 - DNA, 66 bp, Artificial Sequence
  synthetic
tgtatcaaccaataatagtctgaatgtcatgttggaactgctctcattttggagggtaatcacaac

SEQ ID NO: 3043 - DNA, 30 bp, Artificial Sequence
  synthetic
tgtatcaaccaataatagtctgaatgtcat

SEQ ID NO: 3044 - DNA, 36 bp, Artificial Sequence; identical to SEQ ID NO: 1244
  synthetic

SEQ ID NO: 3045 - DNA, 66 bp, Artificial Sequence
  synthetic
ggtgtatcaaccaataatagtctgaatgtcgttggaactgctctcattttggagggtaatcacaac

SEQ ID NO: 3046 - DNA, 30 bp, Artificial Sequence
  synthetic
ggtgtatcaaccaataatagtctgaatgtc

SEQ ID NO: 3047 - DNA, 36 bp, Artificial Sequence; identical to SEQ ID NO: 1244
  synthetic

SEQ ID NO: 3048 - DNA, 66 bp, Artificial Sequence
  synthetic
caggtgtatcaaccaataatagtctgaatggttggaactgctctcattttggagggtaatcacaac

SEQ ID NO: 3049 - DNA, 30 bp, Artificial Sequence
  synthetic
caggtgtatcaaccaataatagtctgaatg

SEQ ID NO: 3050 - DNA, 36 bp, Artificial Sequence; identical to SEQ ID NO: 1244
  synthetic

SEQ ID NO: 3051 - DNA, 66 bp, Artificial Sequence
  synthetic
ttcaggtgtatcaaccaataatagtctgaagttggaactgctctcattttggagggtaatcacaac

SEQ ID NO: 3052 - DNA, 30 bp, Artificial Sequence
  synthetic
ttcaggtgtatcaaccaataatagtctgaa

SEQ ID NO: 3053 - DNA, 36 bp, Artificial Sequence; identical to SEQ ID NO: 1244
  synthetic

SEQ ID NO: 3054 - DNA, 66 bp, Artificial Sequence
  synthetic
gtttcaggtgtatcaaccaataatagtctggttggaactgctctcattttggagggtaatcacaac

SEQ ID NO: 3055 - DNA, 30 bp, Artificial Sequence
  synthetic
gtttcaggtgtatcaaccaataatagtctg

SEQ ID NO: 3056 - DNA, 36 bp, Artificial Sequence; identical to SEQ ID NO: 1244
  synthetic

SEQ ID NO: 3057 - DNA, 66 bp, Artificial Sequence
  synthetic
ttgtttcaggtgtatcaaccaataatagtcgttggaactgctctcattttggagggtaatcacaac

SEQ ID NO: 3058 - DNA, 30 bp, Artificial Sequence
  synthetic
ttgtttcaggtgtatcaaccaataatagtc

SEQ ID NO: 3059 - DNA, 36 bp, Artificial Sequence; identical to SEQ ID NO: 1244
  synthetic

SEQ ID NO: 3060 - DNA, 66 bp, Artificial Sequence
  synthetic
ctttgtttcaggtgtatcaaccaataataggttggaactgctctcattttggagggtaatcacaac

SEQ ID NO: 3061 - DNA, 30 bp, Artificial Sequence
  synthetic
ctttgtttcaggtgtatcaaccaataatag

SEQ ID NO: 3062 - DNA, 36 bp, Artificial Sequence; identical to SEQ ID NO: 1244
  synthetic

SEQ ID NO: 3063 - DNA, 66 bp, Artificial Sequence
  synthetic
tgctttgtttcaggtgtatcaaccaataatgttggaactgctctcattttggagggtaatcacaac

SEQ ID NO: 3064 - DNA, 30 bp, Artificial Sequence
  synthetic
tgctttgtttcaggtgtatcaaccaataat

SEQ ID NO: 3065 - DNA, 36 bp, Artificial Sequence; identical to SEQ ID NO: 1244
  synthetic

SEQ ID NO: 3066 - DNA, 66 bp, Artificial Sequence
  synthetic
gatgctttgtttcaggtgtatcaaccaatagttggaactgctctcattttggagggtaatcacaac

SEQ ID NO: 3067 - DNA, 30 bp, Artificial Sequence
  synthetic
gatgctttgtttcaggtgtatcaaccaata

SEQ ID NO: 3068 - DNA, 36 bp, Artificial Sequence; identical to SEQ ID NO: 1244
  synthetic

SEQ ID NO: 3069 - DNA, 65 bp, Artificial Sequence
  synthetic
ggatgctttgtttcaggtgtatcaaccaagttggaactgctctcattttggagggtaatcacaac

SEQ ID NO: 3070 - DNA, 30 bp, Artificial Sequence
  synthetic
aggatgctttgtttcaggtgtatcaaccaa

SEQ ID NO: 3071 - DNA, 36 bp, Artificial Sequence; identical to SEQ ID NO: 1244
  synthetic

SEQ ID NO: 3072 - DNA, 66 bp, Artificial Sequence
  synthetic
ttaggatgctttgtttcaggtgtatcaaccgttggaactgctctcattttggagggtaatcacaac

SEQ ID NO: 3073 - DNA, 30 bp, Artificial Sequence
  synthetic
ttaggatgctttgtttcaggtgtatcaacc

SEQ ID NO: 3074 - DNA, 36 bp, Artificial Sequence; identical to SEQ ID NO: 1244
  synthetic

SEQ ID NO: 3075 - DNA, 66 bp, Artificial Sequence
  synthetic
ttttaggatgctttgtttcaggtgtatcaagttggaactgctctcattttggagggtaatcacaac

SEQ ID NO: 3076 - DNA, 30 bp, Artificial Sequence
  synthetic
ttttaggatgctttgtttcaggtgtatcaa

SEQ ID NO: 3077 - DNA, 36 bp, Artificial Sequence; identical to SEQ ID NO: 1244
  synthetic

SEQ ID NO: 3078 - DNA, 66 bp, Artificial Sequence
  synthetic
ttttttaggatgctttgtttcaggtgtatcgttggaactgctctcattttggagggtaatcacaac

SEQ ID NO: 3079 - DNA, 30 bp, Artificial Sequence
  synthetic
ttttttaggatgctttgtttcaggtgtatc

SEQ ID NO: 3080 - DNA, 36 bp, Artificial Sequence; identical to SEQ ID NO: 1244
  synthetic

SEQ ID NO: 3081 - DNA, 66 bp, Artificial Sequence
  synthetic
ccttttttaggatgctttgtttcaggtgtagttggaactgctctcattttggagggtaatcacaac

SEQ ID NO: 3082 - DNA, 30 bp, Artificial Sequence
  synthetic
ccttttttaggatgctttgtttcaggtgta

SEQ ID NO: 3083 - DNA, 36 bp, Artificial Sequence; identical to SEQ ID NO: 1244
  synthetic

SEQ ID NO: 3084 - DNA, 66 bp, Artificial Sequence
  synthetic
caccttttttaggatgctttgtttcaggtggttggaactgctctcattttggagggtaatcacaac

SEQ ID NO: 3085 - DNA, 30 bp, Artificial Sequence
  synthetic
caccttttttaggatgctttgtttcaggtg

SEQ ID NO: 3086 - DNA, 36 bp, Artificial Sequence; identical to SEQ ID NO: 1244
  synthetic

SEQ ID NO: 3087 - DNA, 66 bp, Artificial Sequence
  synthetic
tacaccttttttaggatgctttgtttcagggttggaactgctctcattttggagggtaatcacaac

SEQ ID NO: 3088 - DNA, 30 bp, Artificial Sequence
  synthetic
tacaccttttttaggatgctttgtttcagg

SEQ ID NO: 3089 - DNA, 36 bp, Artificial Sequence; identical to SEQ ID NO: 1244
  synthetic

SEQ ID NO: 3090 - DNA, 66 bp, Artificial Sequence
  synthetic
tctacaccttttttaggatgctttgtttcagttggaactgctctcattttggagggtaatcacaac

SEQ ID NO: 3091 - DNA, 30 bp, Artificial Sequence
  synthetic
tctacaccttttttaggatgctttgtttca

SEQ ID NO: 3092 - DNA, 36 bp, Artificial Sequence; identical to SEQ ID NO: 1244
  synthetic

SEQ ID NO: 3093 - DNA, 66 bp, Artificial Sequence
  synthetic
tctctacaccttttttaggatgctttgtttgttggaactgctctcattttggagggtaatcacaac

SEQ ID NO: 3094 - DNA, 30 bp, Artificial Sequence
  synthetic
tctctacaccttttttaggatgctttgttt

SEQ ID NO: 3095 - DNA, 36 bp, Artificial Sequence; identical to SEQ ID NO: 1244
  synthetic

SEQ ID NO: 3096 - DNA, 66 bp, Artificial Sequence
  synthetic
tttctctacaccttttttaggatgctttgtgttggaactgctctcattttggagggtaatcacaac

SEQ ID NO: 3097 - DNA, 30 bp, Artificial Sequence
  synthetic
tttctctacaccttttttaggatgctttgt

SEQ ID NO: 3098 - DNA, 36 bp, Artificial Sequence; identical to SEQ ID NO: 1244
  synthetic

SEQ ID NO: 3099 - DNA, 66 bp, Artificial Sequence
  synthetic
tatttctctacaccttttttaggatgctttgttggaactgctctcattttggagggtaatcacaac

SEQ ID NO: 3100 - DNA, 30 bp, Artificial Sequence
  synthetic
tatttctctacaccttttttaggatgcttt

SEQ ID NO: 3101 - DNA, 36 bp, Artificial Sequence; identical to SEQ ID NO: 1244
  synthetic

SEQ ID NO: 3102 - DNA, 66 bp, Artificial Sequence
  synthetic
catatttctctacaccttttttaggatgctgttggaactgctctcattttggagggtaatcacaac

SEQ ID NO: 3103 - DNA, 30 bp, Artificial Sequence
  synthetic
catatttctctacaccttttttaggatgct

SEQ ID NO: 3104 - DNA, 36 bp, Artificial Sequence; identical to SEQ ID NO: 1244
  synthetic

SEQ ID NO: 3105 - DNA, 66 bp, Artificial Sequence
  synthetic
accatatttctctacaccttttttaggatggttggaactgctctcattttggagggtaatcacaac

SEQ ID NO: 3106 - DNA, 30 bp, Artificial Sequence
  synthetic
accatatttctctacaccttttttaggatg

SEQ ID NO: 3107 - DNA, 36 bp, Artificial Sequence; identical to SEQ ID NO: 1244
  synthetic

SEQ ID NO: 3108 - DNA, 66 bp, Artificial Sequence
  synthetic
ggaccatatttctctacaccttttttaggagttggaactgctctcattttggagggtaatcacaac

SEQ ID NO: 3109 - DNA, 30 bp, Artificial Sequence
  synthetic
ggaccatatttctctacaccttttttagga

SEQ ID NO: 3110 - DNA, 36 bp, Artificial Sequence; identical to SEQ ID NO: 1244
  synthetic

SEQ ID NO: 3111 - DNA, 66 bp, Artificial Sequence
  synthetic
caggaccatatttctctacaccttttttaggttggaactgctctcattttggagggtaatcacaac

SEQ ID NO: 3112 - DNA, 30 bp, Artificial Sequence
  synthetic
caggaccatatttctctacaccttttttag

SEQ ID NO: 3113 - DNA, 36 bp, Artificial Sequence; identical to SEQ ID NO: 1244
  synthetic

SEQ ID NO: 3114 - DNA, 66 bp, Artificial Sequence
  synthetic
ttcaggaccatatttctctacaccttttttgttggaactgctctcattttggagggtaatcacaac

SEQ ID NO: 3115 - DNA, 30 bp, Artificial Sequence
  synthetic
ttcaggaccatatttctctacacctttttt

SEQ ID NO: 3116 - DNA, 36 bp, Artificial Sequence; identical to SEQ ID NO: 1244
  synthetic

SEQ ID NO: 3117 - DNA, 66 bp, Artificial Sequence
  synthetic
gcttcaggaccatatttctctacaccttttgttggaactgctctcattttggagggtaatcacaac

SEQ ID NO: 3118 - DNA, 30 bp, Artificial Sequence
  synthetic
gcttcaggaccatatttctctacacctttt

SEQ ID NO: 3119 - DNA, 36 bp, Artificial Sequence; identical to SEQ ID NO: 1244
  synthetic

SEQ ID NO: 3120 - DNA, 66 bp, Artificial Sequence
  synthetic
ttgcttcaggaccatatttctctacaccttgttggaactgctctcattttggagggtaatcacaac

SEQ ID NO: 3121 - DNA, 30 bp, Artificial Sequence
  synthetic
ttgcttcaggaccatatttctctacacctt

SEQ ID NO: 3122 - DNA, 36 bp, Artificial Sequence; identical to SEQ ID NO: 1244
  synthetic

SEQ ID NO: 3123 - DNA, 66 bp, Artificial Sequence
  synthetic
acttgcttcaggaccatatttctctacaccgttggaactgctctcattttggagggtaatcacaac

SEQ ID NO: 3124 - DNA, 30 bp, Artificial Sequence
  synthetic
acttgcttcaggaccatatttctctacacc

SEQ ID NO: 3125 - DNA, 36 bp, Artificial Sequence; identical to SEQ ID NO: 1244
  synthetic

SEQ ID NO: 3126 - DNA, 66 bp, Artificial Sequence
  synthetic
gcacttgcttcaggaccatatttctctacagttggaactgctctcattttggagggtaatcacaac

SEQ ID NO: 3127 - DNA, 30 bp, Artificial Sequence
  synthetic
gcacttgcttcaggaccatatttctctaca

SEQ ID NO: 3128 - DNA, 36 bp, Artificial Sequence; identical to SEQ ID NO: 1244
  synthetic

SEQ ID NO: 3129 - DNA, 66 bp, Artificial Sequence
  synthetic
atgcacttgcttcaggaccatatttctctagttggaactgctctcattttggagggtaatcacaac

SEQ ID NO: 3130 - DNA, 30 bp, Artificial Sequence
  synthetic
atgcacttgcttcaggaccatatttctcta

SEQ ID NO: 3131 - DNA, 36 bp, Artificial Sequence; identical to SEQ ID NO: 1244
  synthetic

SEQ ID NO: 3132 - DNA, 66 bp, Artificial Sequence
  synthetic
aaatgcacttgcttcaggaccatatttctcgttggaactgctctcattttggagggtaatcacaac

SEQ ID NO: 3133 - DNA, 30 bp, Artificial Sequence
  synthetic
aaatgcacttgcttcaggaccatatttctc

SEQ ID NO: 3134 - DNA, 36 bp, Artificial Sequence; identical to SEQ ID NO: 1244
  synthetic

SEQ ID NO: 3135 - DNA, 66 bp, Artificial Sequence
  synthetic
gtaaatgcacttgcttcaggaccatatttcgttggaactgctctcattttggagggtaatcacaac

SEQ ID NO: 3136 - DNA, 30 bp, Artificial Sequence
  synthetic
gtaaatgcacttgcttcaggaccatatttc

SEQ ID NO: 3137 - DNA, 36 bp, Artificial Sequence; identical to SEQ ID NO: 1244
  synthetic

SEQ ID NO: 3138 - DNA, 66 bp, Artificial Sequence
  synthetic
tcaattttctttgcattttctaccatctttgttggaactgctctcattttggagggtaatcacaac

SEQ ID NO: 3139 - DNA, 30 bp, Artificial Sequence
  synthetic
tcaattttctttgcattttctaccatcttt

SEQ ID NO: 3140 - DNA, 36 bp, Artificial Sequence; identical to SEQ ID NO: 1244
  synthetic

SEQ ID NO: 3141 - DNA, 66 bp, Artificial Sequence
  synthetic
ttcaattttctttgcattttctaccatcttgttggaactgctctcattttggagggtaatcacaac

SEQ ID NO: 3142 - DNA, 30 bp, Artificial Sequence
  synthetic
ttcaattttctttgcattttctaccatctt

SEQ ID NO: 3143 - DNA, 36 bp, Artificial Sequence; identical to SEQ ID NO: 1244
  synthetic

SEQ ID NO: 3144 - DNA, 66 bp, Artificial Sequence
  synthetic
cttcaattttctttgcattttctaccatctgttggaactgctctcattttggagggtaatcacaac

SEQ ID NO: 3145 - DNA, 30 bp, Artificial Sequence
  synthetic
cttcaattttctttgcattttctaccatct

SEQ ID NO: 3146 - DNA, 36 bp, Artificial Sequence; identical to SEQ ID NO: 1244
  synthetic

SEQ ID NO: 3147 - DNA, 64 bp, Artificial Sequence; identical to SEQ ID NO: 2670
  synthetic

SEQ ID NO: 3148 - DNA, 28 bp, Artificial Sequence
  synthetic
tatcaaccaataatagtctgaatgtcat

SEQ ID NO: 3149 - DNA, 36 bp, Artificial Sequence; identical to SEQ ID NO: 14
  synthetic

SEQ ID NO: 3150 - DNA, 64 bp, Artificial Sequence; identical to SEQ ID NO: 2727
  synthetic

SEQ ID NO: 3151 - DNA, 28 bp, Artificial Sequence
  synthetic
ttgcttcaggaccatatttctctacacc

SEQ ID NO: 3152 - DNA, 36 bp, Artificial Sequence; identical to SEQ ID NO: 14
  synthetic

SEQ ID NO: 3153 - DNA, 64 bp, Artificial Sequence; identical to SEQ ID NO: 2760
  synthetic

SEQ ID NO: 3154 - DNA, 28 bp, Artificial Sequence
  synthetic
gcgccactggccacgtggttgctgttgg

SEQ ID NO: 3155 - DNA, 36 bp, Artificial Sequence; identical to SEQ ID NO: 14
  synthetic

SEQ ID NO: 3156 - DNA, 64 bp, Artificial Sequence; identical to SEQ ID NO: 2811
  synthetic

SEQ ID NO: 3157 - DNA, 28 bp, Artificial Sequence
  synthetic
tccccggcgccactggccacgtggttgc

SEQ ID NO: 3158 - DNA, 36 bp, Artificial Sequence; identical to SEQ ID NO: 14
  synthetic

SEQ ID NO: 3159 - DNA, 64 bp, Artificial Sequence; identical to SEQ ID NO: 2820
  synthetic

SEQ ID NO: 3160 - DNA, 28 bp, Artificial Sequence
  synthetic
tctcaatggctttcccctgggtgatgca

SEQ ID NO: 3161 - DNA, 36 bp, Artificial Sequence; identical to SEQ ID NO: 14
  synthetic

SEQ ID NO: 3162 - DNA, 64 bp, Artificial Sequence; identical to SEQ ID NO: 2886
  synthetic

SEQ ID NO: 3163 - DNA, 28 bp, Artificial Sequence
  synthetic
tgggtctcaatggctttcccctgggtga

SEQ ID NO: 3164 - DNA, 36 bp, Artificial Sequence; identical to SEQ ID NO: 14
  synthetic

SEQ ID NO: 3165 - DNA, 66 bp, Artificial Sequence; identical to SEQ ID NO: 3048
  synthetic

SEQ ID NO: 3166 - DNA, 30 bp, Artificial Sequence; identical to SEQ ID NO: 3049
  synthetic

SEQ ID NO: 3167 - DNA, 36 bp, Artificial Sequence; identical to SEQ ID NO: 1244
  synthetic

SEQ ID NO: 3168 - DNA, 66 bp, Artificial Sequence; identical to SEQ ID NO: 3144
  synthetic

SEQ ID NO: 3169 - DNA, 30 bp, Artificial Sequence; identical to SEQ ID NO: 3145
  synthetic

SEQ ID NO: 3170 - DNA, 36 bp, Artificial Sequence; identical to SEQ ID NO: 1244
  synthetic

SEQ ID NO: 3171 - DNA, 66 bp, Artificial Sequence; identical to SEQ ID NO: 2928
  synthetic

SEQ ID NO: 3172 - DNA, 30 bp, Artificial Sequence; identical to SEQ ID NO: 2929
  synthetic

SEQ ID NO: 3173 - DNA, 36 bp, Artificial Sequence; identical to SEQ ID NO: 1244
  synthetic

SEQ ID NO: 3174 - DNA, 66 bp, Artificial Sequence; identical to SEQ ID NO: 2925
  synthetic

SEQ ID NO: 3175 - DNA, 30 bp, Artificial Sequence; identical to SEQ ID NO: 2926
  synthetic

SEQ ID NO: 3176 - DNA, 36 bp, Artificial Sequence; identical to SEQ ID NO: 1244
  synthetic

SEQ ID NO: 3177 - DNA, 66 bp, Artificial Sequence; identical to SEQ ID NO: 2946
  synthetic

SEQ ID NO: 3178 - DNA, 30 bp, Artificial Sequence; identical to SEQ ID NO: 2947
  synthetic

SEQ ID NO: 3179 - DNA, 36 bp, Artificial Sequence; identical to SEQ ID NO: 1244
  synthetic

SEQ ID NO: 3180 - DNA, 66 bp, Artificial Sequence; identical to SEQ ID NO: 2982
  synthetic

SEQ ID NO: 3181 - DNA, 30 bp, Artificial Sequence; identical to SEQ ID NO: 2983
  synthetic

SEQ ID NO: 3182 - DNA, 36 bp, Artificial Sequence; identical to SEQ ID NO: 1244
  synthetic

SEQ ID NO: 3183 - DNA, 64 bp, Artificial Sequence; identical to SEQ ID NO: 2670
  synthetic

SEQ ID NO: 3184 - DNA, 28 bp, Artificial Sequence
  synthetic
tatcaaccaataatagtctgaatgtcat

SEQ ID NO: 3185 - DNA, 36 bp, Artificial Sequence; identical to SEQ ID NO: 14
  synthetic

SEQ ID NO: 3186 - DNA, 64 bp, Artificial Sequence; identical to SEQ ID NO: 2727
  synthetic

SEQ ID NO: 3187 - DNA, 28 bp, Artificial Sequence
  synthetic
ttgcttcaggaccatatttctctacacc

SEQ ID NO: 3188 - DNA, 36 bp, Artificial Sequence; identical to SEQ ID NO: 14
  synthetic

SEQ ID NO: 3189 - DNA, 64 bp, Artificial Sequence; identical to SEQ ID NO: 2760
  synthetic

SEQ ID NO: 3190 - DNA, 28 bp, Artificial Sequence
  synthetic
gcgccactggccacgtggttgctgttgg

SEQ ID NO: 3191 - DNA, 36 bp, Artificial Sequence; identical to SEQ ID NO: 14
  synthetic

SEQ ID NO: 3192 - DNA, 64 bp, Artificial Sequence; identical to SEQ ID NO: 2811
  synthetic

SEQ ID NO: 3193 - DNA, 28 bp, Artificial Sequence
  synthetic
tccccggcgccactggccacgtggttgc

SEQ ID NO: 3194 - DNA, 36 bp, Artificial Sequence; identical to SEQ ID NO: 14
  synthetic

SEQ ID NO: 3195 - DNA, 64 bp, Artificial Sequence; identical to SEQ ID NO: 2820
  synthetic

SEQ ID NO: 3196 - DNA, 28 bp, Artificial Sequence
  synthetic
tctcaatggctttcccctgggtgatgca

SEQ ID NO: 3197 - DNA, 36 bp, Artificial Sequence; identical to SEQ ID NO: 14
  synthetic

SEQ ID NO: 3198 - DNA, 64 bp, Artificial Sequence; identical to SEQ ID NO: 2886
  synthetic

SEQ ID NO: 3199 - DNA, 28 bp, Artificial Sequence
  synthetic
tgggtctcaatggctttcccctgggtga

SEQ ID NO: 3200 - DNA, 36 bp, Artificial Sequence; identical to SEQ ID NO: 14
  synthetic

SEQ ID NO: 3201 - DNA, 66 bp, Artificial Sequence; identical to SEQ ID NO: 3048
  synthetic

SEQ ID NO: 3202 - DNA, 30 bp, Artificial Sequence; identical to SEQ ID NO: 3049
  synthetic

SEQ ID NO: 3203 - DNA, 36 bp, Artificial Sequence; identical to SEQ ID NO: 1244
  synthetic

SEQ ID NO: 3204 - DNA, 66 bp, Artificial Sequence; identical to SEQ ID NO: 3144
  synthetic

SEQ ID NO: 3205 - DNA, 30 bp, Artificial Sequence; identical to SEQ ID NO: 3145
  synthetic

SEQ ID NO: 3206 - DNA, 36 bp, Artificial Sequence; identical to SEQ ID NO: 1244
  synthetic

SEQ ID NO: 3207 - DNA, 66 bp, Artificial Sequence; identical to SEQ ID NO: 2928
  synthetic

SEQ ID NO: 3208 - DNA, 30 bp, Artificial Sequence; identical to SEQ ID NO: 2929
  synthetic

SEQ ID NO: 3209 - DNA, 36 bp, Artificial Sequence; identical to SEQ ID NO: 1244
  synthetic

SEQ ID NO: 3210 - DNA, 66 bp, Artificial Sequence; identical to SEQ ID NO: 2925
  synthetic

SEQ ID NO: 3211 - DNA, 30 bp, Artificial Sequence; identical to SEQ ID NO: 2926
  synthetic

SEQ ID NO: 3212 - DNA, 36 bp, Artificial Sequence; identical to SEQ ID NO: 1244
  synthetic

SEQ ID NO: 3213 - DNA, 66 bp, Artificial Sequence; identical to SEQ ID NO: 2946
  synthetic

SEQ ID NO: 3214 - DNA, 30 bp, Artificial Sequence; identical to SEQ ID NO: 2947
  synthetic

SEQ ID NO: 3215 - DNA, 36 bp, Artificial Sequence; identical to SEQ ID NO: 1244
  synthetic

SEQ ID NO: 3216 - DNA, 66 bp, Artificial Sequence; identical to SEQ ID NO: 2982
  synthetic

SEQ ID NO: 3217 - DNA, 30 bp, Artificial Sequence; identical to SEQ ID NO: 2983
  synthetic

SEQ ID NO: 3218 - DNA, 36 bp, Artificial Sequence; identical to SEQ ID NO: 1244
  synthetic

SEQ ID NO: 3219 - DNA, 64 bp, Artificial Sequence
  synthetic
gatttagactaccccaaaaacgaaggggactaaaacgcacgctggaggggtcgagcacgctcac

SEQ ID NO: 3220 - DNA, 28 bp, Artificial Sequence
  synthetic
gcacgctggaggggtcgagcacgctcac

SEQ ID NO: 3221 - DNA, 36 bp, Artificial Sequence; identical to SEQ ID NO: 14
  synthetic

SEQ ID NO: 3222 - DNA, 64 bp, Artificial Sequence
  synthetic
gatttagactaccccaaaaacgaaggggactaaaaccatcgcagagcacgctggaggggtcgag

SEQ ID NO: 3223 - DNA, 28 bp, Artificial Sequence
  synthetic
catcgcagagcacgctggaggggtcgag

SEQ ID NO: 3224 - DNA, 36 bp, Artificial Sequence; identical to SEQ ID NO: 14
  synthetic

SEQ ID NO: 3225 - DNA, 64 bp, Artificial Sequence; identical to SEQ ID NO: 3219
  synthetic

SEQ ID NO: 3226 - DNA, 28 bp, Artificial Sequence
  synthetic
gcacgctggaggggtcgagcacgctcac

SEQ ID NO: 3227 - DNA, 36 bp, Artificial Sequence; identical to SEQ ID NO: 14
  synthetic

SEQ ID NO: 3228 - DNA, 64 bp, Artificial Sequence; identical to SEQ ID NO: 3222
  synthetic

SEQ ID NO: 3229 - DNA, 28 bp, Artificial Sequence
  synthetic
catcgcagagcacgctggaggggtcgag

SEQ ID NO: 3230 - DNA, 36 bp, Artificial Sequence; identical to SEQ ID NO: 14
  synthetic

SEQ ID NO: 3231 - DNA, 66 bp, Artificial Sequence; identical to SEQ ID NO: 3048
  synthetic

SEQ ID NO: 3232 - DNA, 30 bp, Artificial Sequence; identical to SEQ ID NO: 3049
  synthetic

SEQ ID NO: 3233 - DNA, 36 bp, Artificial Sequence; identical to SEQ ID NO: 1244
  synthetic

SEQ ID NO: 3234 - DNA, 66 bp, Artificial Sequence; identical to SEQ ID NO: 3144
  synthetic

SEQ ID NO: 3235 - DNA, 30 bp, Artificial Sequence; identical to SEQ ID NO: 3145
  synthetic

SEQ ID NO: 3236 - DNA, 36 bp, Artificial Sequence; identical to SEQ ID NO: 1244
  synthetic

SEQ ID NO: 3237 - DNA, 66 bp, Artificial Sequence; identical to SEQ ID NO: 3048
  synthetic

SEQ ID NO: 3238 - DNA, 30 bp, Artificial Sequence; identical to SEQ ID NO: 3049
  synthetic

SEQ ID NO: 3239 - DNA, 36 bp, Artificial Sequence; identical to SEQ ID NO: 1244
  synthetic

SEQ ID NO: 3240 - DNA, 66 bp, Artificial Sequence; identical to SEQ ID NO: 3144
  synthetic

SEQ ID NO: 3241 - DNA, 30 bp, Artificial Sequence; identical to SEQ ID NO: 3145
  synthetic

SEQ ID NO: 3242 - DNA, 36 bp, Artificial Sequence; identical to SEQ ID NO: 1244
  synthetic

SEQ ID NO: 3243 - DNA, 64 bp, Artificial Sequence
  synthetic
gatttagactaccccaaaaacgaaggggactaaaacaagatgtggatttttacatagtaaaaat

SEQ ID NO: 3244 - DNA, 28 bp, Artificial Sequence
  synthetic
aagatgtggatttttacatagtaaaaat

SEQ ID NO: 3245 - DNA, 36 bp, Artificial Sequence; identical to SEQ ID NO: 14
  synthetic

SEQ ID NO: 3246 - DNA, 66 bp, Artificial Sequence; identical to SEQ ID NO: 3048
  synthetic

SEQ ID NO: 3247 - DNA, 30 bp, Artificial Sequence; identical to SEQ ID NO: 3049
  synthetic

SEQ ID NO: 3248 - DNA, 36 bp, Artificial Sequence; identical to SEQ ID NO: 1244
  synthetic

SEQ ID NO: 3249 - DNA, 64 bp, Artificial Sequence; identical to SEQ ID NO: 3243
  synthetic

SEQ ID NO: 3250 - DNA, 28 bp, Artificial Sequence
  synthetic
aagatgtggatttttacatagtaaaaat

SEQ ID NO: 3251 - DNA, 36 bp, Artificial Sequence; identical to SEQ ID NO: 14
  synthetic

SEQ ID NO: 3252 - DNA, 66 bp, Artificial Sequence; identical to SEQ ID NO: 3048
  synthetic

SEQ ID NO: 3253 - DNA, 30 bp, Artificial Sequence; identical to SEQ ID NO: 3049
  synthetic

SEQ ID NO: 3254 - DNA, 36 bp, Artificial Sequence; identical to SEQ ID NO: 1244
  synthetic

SEQ ID NO: 3255 - DNA, 64 bp, Artificial Sequence; identical to SEQ ID NO: 3243
  synthetic

SEQ ID NO: 3256 - DNA, 28 bp, Artificial Sequence
  synthetic
aagatgtggatttttacatagtaaaaat

SEQ ID NO: 3257 - DNA, 36 bp, Artificial Sequence; identical to SEQ ID NO: 14
  synthetic

SEQ ID NO: 3258 - DNA, 64 bp, Artificial Sequence
  synthetic
gatttagactaccccaaaaacgaaggggactaaaacatttctagaattgaaggaattaaaccaa

SEQ ID NO: 3259 - DNA, 28 bp, Artificial Sequence
  synthetic
atttctagaattgaaggaattaaaccaa

SEQ ID NO: 3260 - DNA, 36 bp, Artificial Sequence; identical to SEQ ID NO: 14
  synthetic

SEQ ID NO: 3261 - DNA, 64 bp, Artificial Sequence; identical to SEQ ID NO: 3243
  synthetic

SEQ ID NO: 3262 - DNA, 28 bp, Artificial Sequence
  synthetic
aagatgtggatttttacatagtaaaaat

SEQ ID NO: 3263 - DNA, 36 bp, Artificial Sequence; identical to SEQ ID NO: 14
  synthetic

SEQ ID NO: 3264 - DNA, 64 bp, Artificial Sequence
  synthetic
gatttagactaccccaaaaacgaaggggactaaaacggggtggagtagagggcgcgaccaagag

SEQ ID NO: 3265 - DNA, 28 bp, Artificial Sequence
  synthetic
ggggtggagtagagggcgcgaccaagag

SEQ ID NO: 3266 - DNA, 36 bp, Artificial Sequence; identical to SEQ ID NO: 14
  synthetic

SEQ ID NO: 3267 - DNA, 66 bp, Artificial Sequence
  synthetic
acgccaagcttgcatgcctgcaggtcgagtgttggaactgctctcattttggagggtaatcacaac

SEQ ID NO: 3268 - DNA, 30 bp, Artificial Sequence
  synthetic
acgccaagcttgcatgcctgcaggtcgagt

SEQ ID NO: 3269 - DNA, 36 bp, Artificial Sequence; identical to SEQ ID NO: 1244
  synthetic

SEQ ID NO: 3270 - DNA, 64 bp, Zika Virus; identical to SEQ ID NO: 1083

SEQ ID NO: 3271 - DNA, 28 bp, Zika Virus
actccctagaaccacgacagtttgcctt

SEQ ID NO: 3272 - DNA, 36 bp, Zika Virus; identical to SEQ ID NO: 14

SEQ ID NO: 3273 - DNA, 66 bp, Dengue Virus
tttgcttctgtccagtgagcatggtcttcggttggaactgctctcattttggagggtaatcacaac

SEQ ID NO: 3274 - DNA, 30 bp, Dengue Virus
tttgcttctgtccagtgagcatggtcttcg

SEQ ID NO: 3275 - DNA, 36 bp, Dengue Virus; identical to SEQ ID NO: 1244

SEQ ID NO: 3276 - DNA, 40 bp, Artificial Sequence
  synthetic
taatttctactcttgtagatctgtgtttatccgctcacaa

SEQ ID NO: 3277 - DNA, 20 bp, Artificial Sequence
  synthetic
ctgtgtttatccgctcacaa

SEQ ID NO: 3278 - DNA, 20 bp, Artificial Sequence
  synthetic
taatttctactcttgtagat

SEQ ID NO: 3279 - DNA, 168 bp, Ebola Virus
attcgcagtgaagagttgtctttcacagttgtatcaaacggagccaaaaacatcagtggtcagagtccggcgcgaacttcttccgacccagggaccaacacaacaactgaagaccacaaaatcatggcttcagaaaattcctctgcaatggttcaagtgcacagtcaa

SEQ ID NO: 3280 - DNA, 174 bp, Zika Virus
gacaccggaactccacactggaacaacaaagaagcactggtagagttcaaggacgcacatgccaaaaggcaaactgtcgtggttctagggagtcaagaaggagcagttcacacggcccttgctggagctctggaggctgagatggatggtgcaaagggaaggctgtcctctggc

SEQ ID NO: 3281 - DNA, 173 bp, Artificial Sequence
  synthetic
agcgattgatggtgatactgttaaattaatgtacaaaggtcaaccaatgacattcagactattattggttgatacacctgaaacaaagcatcctaaaaaaggtgtagagaaatatggtcctgaagcaagtgcatttacgaaaaagatggtagaaaatgcaaagaaaattgaag

SEQ ID NO: 3282 - DNA, 175 bp, Artificial Sequence
  synthetic
cacctggatggaccgcctagccccaggagccccgtcataggaagtgaggtcttcctgcccaacagcaaccacgtggccagtggcgccggggaggcagccattgagacccagagcagcagttctgaagagatagtgcccagccctccctcgccaccccctctaccccgcatctaca

SEQ ID NO: 3283 - DNA, 175 bp, Artificial Sequence
  synthetic
ggaggagccccagagcctgcaagctgccgtgcgcaccgatggcttcgacgagttcaaggtgcgcctgcaggacctcagctcttgcatcacccaggggaaagccattgagacccagagcagcagttctgaagagatagtgcccagccctccctcgccaccccctctaccccgcatc

SEQ ID NO: 3284 - DNA, 175 bp, Artificial Sequence
  synthetic
gtcgggcgcgcacgttttcccttcgctgagcacgctgcgcgcgtcgcctacgtgaatgcgctgttcgatgcgttggccgaaggcaacccgcgggtgagcgtgctcgacccctccagcgtgctctgcgatggcctggattgtttcgccgaacgtgatggctggtcgctgtacatgg

SEQ ID NO: 3285 - DNA, 173 bp, Artificial Sequence; identical to SEQ ID NO: 3281
  synthetic

SEQ ID NO: 3286 - DNA, 173 bp, Artificial Sequence; identical to SEQ ID NO: 3281
  synthetic

SEQ ID NO: 3287 - DNA, 78 bp, Artificial Sequence
  synthetic
ggccagtttgaataagacaatgaattatttttactatgtaaaaatccacatctttcacatttccattcttgtgtttca

SEQ ID NO: 3288 - DNA, 173 bp, Artificial Sequence; identical to SEQ ID NO: 3281
  synthetic

SEQ ID NO: 3289 - DNA, 78 bp, Artificial Sequence; identical to SEQ ID NO: 3287
  synthetic

SEQ ID NO: 3290 - DNA, 173 bp, Artificial Sequence
  synthetic
ggccagtgaattcgagctcggtacccggggatcctctagaaatatggattacttggtagaacagcaatctactcgacctgcaggcatgcaagcttggcgtaatcatggtcatagctgtttcctgtgtttatccgctcacaattccacacaacatacgagccggaagcataaag

SEQ ID NO: 3291 - DNA, 173 bp, Artificial Sequence; identical to SEQ ID NO: 3281
  synthetic

SEQ ID NO: 3292 - DNA, 170 bp, Dengue Virus
agtacatattcaggggccaacctctcaacaatgacgaagaccatgctcactggacagaagcaaaaatgctgctggacaacatcaacacaccagaagggattataccagctctctttgaaccagaaagggagaagtcagccgccatagacggtgaataccgcctgaagggt

SEQ ID NO: 3293 - DNA, 78 bp, Artificial Sequence; identical to SEQ ID NO: 3287
  synthetic

SEQ ID NO: 3294 - DNA, 102 bp, Artificial Sequence
  synthetic
attgttacattgtacacatacataagcaacataagcatcatttggtttaattccttcaattctagaaatatttgtttgattttttacttcacgcctactcat

SEQ ID NO: 3295 - DNA, 78 bp, Artificial Sequence; identical to SEQ ID NO: 3287
  synthetic

SEQ ID NO: 3296 - DNA, 194 bp, Artificial Sequence
  synthetic
aagttacaactcaataaggttgacgaaaacggcaccccaaaaccctcgtctcttggtcgcgccctctactccacccccatccacatttgggacaaagaaaccggtagcgttgccagcttcgccgcttccttcaacttcaccttctatgcccctgacacaaaaaggcttgcagatgggcttgccttctttctcgc

SEQ ID NO: 3297 - DNA, 173 bp, Artificial Sequence; identical to SEQ ID NO: 3290
  synthetic

SEQ ID NO: 3298 - DNA, 174 bp, Zika Virus; identical to SEQ ID NO: 3280

SEQ ID NO: 3299 - DNA, 170 bp, Dengue Virus; identical to SEQ ID NO: 3292

SEQ ID NO: 3300 - DNA, 173 bp, Artificial Sequence; identical to SEQ ID NO: 3290
  synthetic

SEQ ID NO: 3301 - DNA, 48 bp, Artificial Sequence
  synthetic
gaaattaatacgactcactatagggctacgtgaatgcgctgttcgatg

SEQ ID NO: 3302 - DNA, 25 bp, Artificial Sequence
  synthetic
catcacgttcggcgaaacaatccag

SEQ ID NO: 3303 - DNA, 48 bp, Artificial Sequence; identical to SEQ ID NO: 3301
  synthetic

SEQ ID NO: 3304 - DNA, 25 bp, Artificial Sequence
  synthetic
catcacgttcggcgaaacaatccag

SEQ ID NO: 3305 - DNA, 48 bp, Artificial Sequence; identical to SEQ ID NO: 3301
  synthetic

SEQ ID NO: 3306 - DNA, 25 bp, Artificial Sequence
  synthetic
catcacgttcggcgaaacaatccag

SEQ ID NO: 3307 - DNA, 53 bp, Artificial Sequence
  synthetic
gaaattaatacgactcactatagggtgtacaaaggtcaaccaatgacattcag

SEQ ID NO: 3308 - DNA, 25 bp, Artificial Sequence
  synthetic
tgcacttgcttcaggaccatatttc

SEQ ID NO: 3309 - DNA, 53 bp, Artificial Sequence; identical to SEQ ID NO: 3307
  synthetic

SEQ ID NO: 3310 - DNA, 25 bp, Artificial Sequence
  synthetic
tgcacttgcttcaggaccatatttc

SEQ ID NO: 3311 - DNA, 53 bp, Artificial Sequence; identical to SEQ ID NO: 3307
  synthetic

SEQ ID NO: 3312 - DNA, 25 bp, Artificial Sequence
  synthetic
tgcacttgcttcaggaccatatttc

SEQ ID NO: 3313 - DNA, 50 bp, Artificial Sequence
  synthetic
gaaattaatacgactcactatagggagcgattgatggtgatactgttaaa

SEQ ID NO: 3314 - DNA, 25 bp, Artificial Sequence
  synthetic
tcgtaaatgcacttgcttcaggacc

SEQ ID NO: 3315 - DNA, 47 bp, Artificial Sequence
  synthetic
gaaattaatacgactcactatagggggccagtttgaataagacaatg

SEQ ID NO: 3316 - DNA, 22 bp, Artificial Sequence
  synthetic
ggccagtttgaataagacaatg

SEQ ID NO: 3317 - DNA, 50 bp, Artificial Sequence; identical to SEQ ID NO: 3313
  synthetic

SEQ ID NO: 3318 - DNA, 25 bp, Artificial Sequence
  synthetic
tcgtaaatgcacttgcttcaggacc

SEQ ID NO: 3319 - DNA, 47 bp, Artificial Sequence; identical to SEQ ID NO: 3315
  synthetic

SEQ ID NO: 3320 - DNA, 22 bp, Artificial Sequence
  synthetic
ggccagtttgaataagacaatg

SEQ ID NO: 3321 - DNA, 50 bp, Artificial Sequence; identical to SEQ ID NO: 3313
  synthetic

SEQ ID NO: 3322 - DNA, 25 bp, Artificial Sequence
  synthetic
tcgtaaatgcacttgcttcaggacc

SEQ ID NO: 3323 - DNA, 47 bp, Artificial Sequence; identical to SEQ ID NO: 3315
  synthetic

SEQ ID NO: 3324 - DNA, 22 bp, Artificial Sequence
  synthetic
ggccagtttgaataagacaatg

SEQ ID NO: 3325 - DNA, 47 bp, Artificial Sequence; identical to SEQ ID NO: 3315
  synthetic

SEQ ID NO: 3326 - DNA, 22 bp, Artificial Sequence
  synthetic
ggccagtttgaataagacaatg

SEQ ID NO: 3327 - DNA, 47 bp, Artificial Sequence; identical to SEQ ID NO: 3315
  synthetic

SEQ ID NO: 3328 - DNA, 22 bp, Artificial Sequence
  synthetic
ggccagtttgaataagacaatg

SEQ ID NO: 3329 - DNA, 47 bp, Artificial Sequence
  synthetic
gaaattaatacgactcactatagggattgttacattgtacacataca

SEQ ID NO: 3330 - DNA, 22 bp, Artificial Sequence
  synthetic
attgttacattgtacacataca

SEQ ID NO: 3331 - DNA, 47 bp, Artificial Sequence; identical to SEQ ID NO: 3329
  synthetic

SEQ ID NO: 3332 - DNA, 22 bp, Artificial Sequence
  synthetic
attgttacattgtacacataca

SEQ ID NO: 3333 - DNA, 47 bp, Artificial Sequence; identical to SEQ ID NO: 3315
  synthetic

SEQ ID NO: 3334 - DNA, 22 bp, Artificial Sequence
  synthetic
tgaaacacaagaatggaaatgt

SEQ ID NO: 3335 - DNA, 60 bp, Artificial Sequence
  synthetic
gaaattaatacgactcactataggggatcctctagaaatatggattacttggtagaacag

SEQ ID NO: 3336 - DNA, 35 bp, Artificial Sequence
  synthetic
gataaacacaggaaacagctatgaccatgattacg

SEQ ID NO: 3337 - DNA, 50 bp, Artificial Sequence
  synthetic
gaaattaatacgactcactatagggtcaataaggttgacgaaaacggcac

SEQ ID NO: 3338 - DNA, 25 bp, Artificial Sequence
  synthetic
tagaaggtgaagttgaaggaagcgg

SEQ ID NO: 3339 - DNA, 60 bp, Artificial Sequence; identical to SEQ ID NO: 3335
  synthetic

SEQ ID NO: 3340 - DNA, 35 bp, Artificial Sequence; identical to SEQ ID NO: 3336
  synthetic

SEQ ID NO: 3341 - DNA, 50 bp, Artificial Sequence; identical to SEQ ID NO: 3337
  synthetic

SEQ ID NO: 3342 - DNA, 25 bp, Artificial Sequence
  synthetic
tagaaggtgaagttgaaggaagcgg

SEQ ID NO: 3343 - DNA, 47 bp, Artificial Sequence; identical to SEQ ID NO: 3315
  synthetic

SEQ ID NO: 3344 - DNA, 22 bp, Artificial Sequence
  synthetic
tgaaacacaagaatggaaatgt

SEQ ID NO: 3345 - RNA, 12 nt, Artificial Sequence
  Synthetic
  misc_feature (1)..(1): /56-FAM/=isomer derivative of fluorescein attachment for oligonucleotides
  misc_feature (12)..(12): Biotin Tag = /3Bio/
rurururururu

SEQ ID NO: 3346 - RNA, 10 nt, Artificial Sequence
  Synthetic
  misc_feature (1)..(1): /56-FAM/=isomer derivative of fluorescein attachment for oligonucleotides
  misc_feature (10)..(10): /3IABkFQ/=Iowa Black quencher
rururururu

SEQ ID NO: 3347 - DNA, 49 bp, Artificial Sequence
  Synthetic
  misc_feature (1)..(1): /56-FAM/=isomer derivative of fluorescein attachment for oligonucleotides
cagaggaacgtctatctaacggttggtatcttgaatgctcagtcccttt

SEQ ID NO: 3348 - DNA, 49 bp, Artificial Sequence
  Synthetic
  misc_feature (49)..(49): /3BHQ_1/=Black Hole Quencher
aaagggactgagcattcaagataccaaccgttagatagacgttcctctg

SEQ ID NO: 3349 - DNA, 21 bp, Artificial Sequence
  Synthetic
cagtgtacgccttctccatca

SEQ ID NO: 3350 - DNA, 18 bp, Artificial Sequence
  Synthetic
ctgctggaggctgtggac

SEQ ID NO: 3351 - DNA, 20 bp, Artificial Sequence
  Synthetic
gcttgtagatgcggggtaga

SEQ ID NO: 3352 - DNA, 21 bp, Artificial Sequence
  Synthetic
tcaagatggagtctgaggagg

SEQ ID NO: 3353 - DNA, 19 bp, Artificial Sequence
  Synthetic
agcgcgactacgaggagat

SEQ ID NO: 3354 - DNA, 20 bp, Artificial Sequence
  Synthetic
ctgctgctctgggtctcaat

SEQ ID NO: 3355 - DNA, 22 bp, Artificial Sequence
  Synthetic
gaagtgtttcagaagcttctcc

SEQ ID NO: 3356 - DNA, 21 bp, Artificial Sequence
  Synthetic
gtttgggcttcacaccattcc

SEQ ID NO: 3357 - DNA, 21 bp, Artificial Sequence
  Synthetic
cagatgctgaccaactcgtgt

SEQ ID NO: 3358 - DNA, 23 bp, Artificial Sequence
  Synthetic
ttccccattgtgattatagccta

SEQ ID NO: 3359 - DNA, 21 bp, Artificial Sequence
  Synthetic
gactgcagctccaatgagaac

SEQ ID NO: 3360 - DNA, 21 bp, Artificial Sequence
  Synthetic
gtttgggcttcacaccattcc

SEQ ID NO: 3361 - DNA, 21 bp, Artificial Sequence
  Synthetic
cagaactcgcaacagtccttc

SEQ ID NO: 3362 - DNA, 23 bp, Artificial Sequence
  Synthetic
ttccccattgtgattatagccta

SEQ ID NO: 3363 - DNA, 20 bp, Artificial Sequence
  Synthetic
gcaccgtcaaggctgagaac

SEQ ID NO: 3364 - DNA, 19 bp, Artificial Sequence
  Synthetic
tggtgaagacgccagtgga

What is claimed is:

1. A nucleic acid detection system for detecting the presence of one or more cancers in a sample, comprising:
one or more CRISPR system comprising one or more Cas proteins and one or more optimized guide molecules designed to bind to one or more corresponding target molecules of one or more cancer fusion genes; and
one or more RNA-based detection constructs.

2. The system of claim 1, wherein the optimized guide for the target molecule is generated by
(a) pooling a set of guides, the guides produced by tiling guides across the target molecule;
(b) incubating the set of guides with a Cas polypeptide and the target molecule and measuring cleavage activity of each guide in the set;
(c) creating a training model based on the cleavage activity of the set of guides in the incubating step;
(d) predicting highly active guides for the target molecule; and
(e) identifying the optimized guides by incubating the predicted highly active guides with the Cas polypeptide and the target molecule and selecting optimized guides.

3. The system of claim 1, wherein the one or more cancers is selected from acute promyelocytic leukemia (APML), chronic myeloid leukemia (CIVIL), and/or acute lymphoblastic leukemia (ALL).

4. The system of claim 1, wherein the cancer fusion gene is a PML-RARa fusion.

5. The system of claim 1, wherein the Cas protein is LwaCas13a and the guide molecule comprises SEQ ID NO: 2761, 2764, 2767, 2770, 2773, 2776, 2779, 2782, 2785, 2788, 2791, 2794, 2797, 2800, 2803, 2806, 2809, 2812, 2815, 2818, 2821, 2824, 2827, 2830, 2833, 2836, 2839, 2842, 2845, 2848, 2851, 2854, 2857, 2860, 2863, 2866, 2869, 2872, 2875, 2878, 2881, 2884, or 2887.

6. The system of claim 1, wherein the Cas protein is LwaCas13a and the guide molecule comprises SEQ ID NO: 2760, 2763, 2766, 2769, 2772, 2775, 2778, 2781, 2784, 2787, 2790, 2793, 2796, 2799, 2802, 2805, 2808, 2811, 2814, 2817, 2820, 2823, 2826, 2829, 2832, 2835, 2838, 2841, 2844, 2847, 2850, 2853, 2856, 2859, 2862, 2865, 2868, 2871, 2874, 2877, 2880, 2883, 2886, 3189, or 3195.

7. The system of claim 1, wherein the Cas protein is CcaCas13b and the guide molecule comprises SEQ ID NO: 2890, 2893, 2896, 2899, 2902, 2905, 2908, 2911, 2914, 2917, 2920, 2923, 2926, 2929, 2932, 2935, 2938, 2941, 2944, 2947, 2950, 2953, 2956, 2959, 2962, 2965, 2968, 2971, 2974, 2977, 2980, 2983, 2986, 2989, 2992, 2995, 2998, or 3001.

8. The system of claim 1, wherein the Cas protein is CcaCas13b and the guide molecule comprises SEQ ID NO: 2889, 2892, 2895, 2898, 2901, 2904, 2907, 2910, 2913, 2916, 2919, 2922, 2925, 2928, 2931, 2934, 2937, 2940, 2943, 2946, 2949, 2952, 2955, 2958, 2961, 2964, 2967, 2970, 2973, 2976, 2979, 2982, 2985, 2988, 2991, 2994, 2997, 3171, 3207, 3177 or 3213.

9. The system of claim 2, wherein the optimized guide is generated for a Cas13 ortholog.

10. The system of the claim 9, wherein the optimized guide is generated for an LwaCas13a or a CcaCas13b ortholog.

11. The system of claim 2, wherein the Cas protein is LwaCas13a and the guide molecule comprises a top predicted guide selected from SEQ ID NOs: 3153, 3159, 3189 or 3195 .

12. The system of claim 9, wherein the Cas protein is CcaCas13b and the guide molecule comprises a top predicted guide selected from SEQ ID NOs: 3207, 3231, 3171 or 3177.

13. The system of claim 1, wherein the guide molecule is directed to a BCR-ABL fusion.

14. The system of claim 13, wherein the BCR-ABL fusion is the BCR-ABL p210 b3a2 fusion, b2a2 fusion, or a p190 e1a2 fusion.

15. The system of claim 1, wherein the RNA-based masking construct comprises a silencing RNA that suppresses generation of a gene product encoded by a reporting construct, wherein the gene product generates a detectable positive signal when expressed.

16. The system of claim 1, wherein the RNA-based masking construct is a ribozyme that generates a negative detectable signal, and wherein the detectable positive signal is generated when the ribozyme is deactivated.

17. The system of claim 16, wherein the ribozyme converts a substrate to a first color and wherein the substrate converts to a second color when the ribozyme is deactivated.

18. The system of claim 1, wherein the RNA-based masking construct is an RNA aptamer and/or comprises an RNA-tethered inhibitor.

19. The system of claim 18, wherein the aptamer or RNA-tethered inhibitor sequesters an enzyme, wherein the enzyme generates a detectable signal upon release from the aptamer or RNA tethered inhibitor by acting upon a substrate.

20. The system of claim 18, wherein the aptamer is an inhibitory aptamer that inhibits an enzyme and prevents the enzyme from catalyzing generation of a detectable signal from a substrate or wherein the RNA-tethered inhibitor inhibits an enzyme and prevents the enzyme from catalyzing generation of a detectable signal from a substrate.

21. The system of claim 20, wherein the enzyme is thrombin, protein C, neutrophil elastase, subtilisin, horseradish peroxidase, beta-galactosidase, or calf alkaline phosphatase.

22. The system of claim 21, wherein the enzyme is thrombin and the substrate is para-nitroanilide covalently linked to a peptide substrate for thrombin, or 7-amino-4-methylcoumarin covalently linked to a peptide substrate for thrombin.

23. The system of claim 18, wherein the aptamer sequesters a pair of agents that when released from the aptamers combine to generate a detectable signal.

24. The system of claim 1, wherein the RNA-based masking construct comprises an RNA oligonucleotide to which a detectable ligand and a masking component are attached.

25. The system of claim 1, wherein the RNA-based masking construct comprises a nanoparticle held in aggregate by bridge molecules, wherein at least a portion of the bridge molecules comprises RNA, and wherein the solution undergoes a color shift when the nanoparticle is disbursed in solution.

26. The system of claim 25, wherein the nanoparticle is a colloidal metal, optionally colloidal gold.

27. The system of claim 1, wherein the detection construct is a gold nanoparticle, optionally modified with a binding agent that specifically binds the second molecule of the detection construct.

28. The system of claim 1, wherein the RNA-based masking construct comprising a quantum dot linked to one or more quencher molecules by a linking molecule, wherein at least a portion of the linking molecule comprises RNA.

29. The system of claim 1, wherein the RNA-based masking construct comprises RNA in complex with an intercalating agent, wherein the intercalating agent changes absorbance upon cleavage of the RNA.

30. The system of claim 29, wherein the intercalating agent is pyronine-Y or methylene blue.

31. The system of claim 1, wherein the detectable ligand is a fluorophore and the masking component is a quencher molecule.

32. The system of claim 1, wherein the RNA-based detection construct is a nucleic-acid based aptamer comprising quadruplex having enzymatic activity.

33. The system of claim 32, wherein the enzymatic activity is peroxidase activity.

34. The system of claim 1, wherein the detection construct comprises a first molecule on a first end and a second molecule on a second end.

35. The system of claim 34, wherein FAM is the first molecule and biotin or Digoxigenin (DIG) is the second molecule, or wherein Tye665 is the first molecule and Alexa-488 or FAM is the second molecule.

36. The system of claim 1, wherein the one or more Cas proteins is one or more Type V Cas proteins, one or more Type VI proteins, or a combination of Type V and Type VI proteins.

37. The system of claim 36, wherein the Type VI Cas protein is a Cas13.

38. The system of the claim 36, wherein the Type V Cas protein is a Cas12.

39. The system of claim 2, wherein the training model comprises one or more input features selected from guide sequence, flanking target sequence, normalized positions of the guide in the target and guide GC content.

40. The system of claim 39, wherein the guide sequence and/or flanking sequence input comprises one hit encoding mono-nucleotide and/or dinucleotide based identities across a guide length and flanking sequence in the target.

41. The system of claim 39, wherein the training model comprises applying logistic regression model on the activity of the guides across the one or more input features.

42. The system of claim 2, wherein the predicting highly active guides for the target molecule comprises selecting guides with an increase in activity of a guide relative to the median activity, or selecting guides with highest guide activity.

43. The system of claim 42, wherein the increase in activity is measured by an increase in fluorescence.

44. The system of claim 43, wherein the guides are selected with a 1.5, 2, 2.5 or 3-fold activity relative to median, or are in the top quartile or quintile for each target tested.

45. The system of any of the preceding claims, further comprising one or more amplification reagents to amplify the one or more target molecules.

46. The system of claim 45, wherein the reagents to amplify the one or more target RNA molecules comprise nucleic acid sequence-based amplification (NASBA), recombinase polymerase amplification (RPA), loop-mediated isothermal amplification (LAMP), strand displacement amplification (SDA), helicase-dependent amplification (HDA), nicking enzyme amplification reaction (NEAR), PCR, multiple displacement amplification (MDA), rolling circle amplification (RCA), ligase chain reaction (LCR), or ramification amplification method (RAM).

47. A lateral flow device comprising a substrate comprising a first end, wherein the first end comprises a sample loading portion and a first region loaded with a detection construct and one or more nucleic acid detection systems of any one of the preceding claims, a first capture region comprising a first binding agent, and a second capture region comprising a second binding agent.

48. The lateral flow device of claim 47, wherein the detection construct comprises a first molecule on a first end and a second molecule on a second end.

49. The lateral flow device of claim 48, comprising two nucleic acid detection systems and a first detection construct comprising Alexa-488 and a second detection construct comprising FAM.

50. The lateral flow device of claim 47, wherein the sample loading portion further comprises one or more amplification reagents to amplify the one or more target molecules.

51. A method for detecting a cancer fusion gene in a sample, comprising contacting the sample with the nucleic acid detection system of any of claims 1 to 46 or the lateral flow device of any one of claims 47-50; and detecting target fusion sequence.

52. The method of claim 51, further comprising amplifying the target molecules in the sample by RT-RPA.

53. The method of claim 51, wherein contacting the sample with the nucleic acid detection system comprises contacting the sample with a lateral flow device.

54. The method of claim 53, wherein the sample is blood, bone marrow, or pelleted cells.

55. The method of claim 53, further comprising steps of extracting RNA, performing RT-RPA, performing T7 transcription, and detecting the target nucleic acids.

56. The method of claim 53, wherein detecting the target nucleic acids comprises:
activating the Cas protein via binding of the one or more guide molecules to the one or more cancer-specific target molecules, wherein activating the Cas protein results in modification of the RNA-based masking construct such that a detectable positive signal is produced; and
detecting the signal, wherein detection of the signal indicates the presence of a cancer-specific fusion gene.

57. The method of claim 56, wherein detecting step is less than about 45 minutes to less than about 3 hours.

58. The method of claim 53, wherein a plurality of cancer fusion genes can be detected simultaneously on a multiplex lateral flow strip.

59. The method of claim 58, further comprising detecting PML-RARa Intron/exon 6 fusion and Intron 3 fusion simultaneously on multiplex lateral flow.

60. The method of claim 53, wherein the detection construct comprises a FAM and/or Alexa 488.

61. The method of claim 53, further comprising detected target fusion sequences with a sensitivity of about 2 fM, or about 200 aM.
